(19) United States
(12) Patent Application Publication
(10) Pub. No.: US 2024/0352539 A1
(43) Pub. Date: Oct. 24, 2024

(54) PATHOGEN SPECIFIC NUCLEIC ACID FRAGMENT AND APPLICATION THEREOF

(71) Applicant: METHYCURE BIOTECH CORP., Jiangsu (CN)

(72) Inventors: Qihan Chen, Jiangsu (CN); Qiang Wang, Jiangsu (CN)

(21) Appl. No.: 18/245,619

(22) PCT Filed: Sep. 16, 2021
(86) PCT No.: PCT/CN2021/118722

§ 371 Date: Mar. 16, 2023

(30) Foreign Application Priority Data
Sep. 16, 2020 (WO) PCT/CN2020/115682

(51) Int. Cl. C12Q 1/689

(52) U.S. Cl. CPC C12Q 1/689

(57) ABSTRACT

Provided are a plurality of pathogen specific nucleic acid fragments. Also provided is a method for identifying one or more pathogens, comprising: 1) providing a sample that may comprise the pathogens; and 2) detecting whether a pathogen specific nucleic acid fragment exits in the sample or not or detecting the content of pathogen specific nucleic acid fragment in the sample, wherein the presence or absence of the pathogen specific nucleic acid fragment or the content thereof respectively reflects the presence or absence of a pathogen corresponding to the pathogen specific nucleic acid fragment in the sample or the content thereof. The provided pathogen specific nucleic acid fragment can be applied to rapid identification of pathogens, and in clinical application, the positive detection rate is high and the detection period is short.

### CROSS-REFERENCE TO RELATED APPLICATION

[0001] This application claims the benefit of priority to International Patent Application No. PCT/CN2020/115682 filed Sep. 16, 2020, the disclosure of which is incorporated herein in its entirety by reference.

### REFERENCE TO SEQUENCE LISTING IN COMPUTER READABLE FORMAT

[0002] An electronic sequence listing in computer readable format (file name: P10886PCT.210916.SEQUENCE LISTING_ST25.txt, filed Sep. 16, 2021, size: 1,011 KB) is filed with this application, the disclosure of which is incorporated herein in its entirety by reference.

### TECHNICAL FIELD

[0003] The present invention relates to a pathogen specific nucleic acid fragment, and also relates to a method for utilizing the pathogen specific nucleic acid fragment for identification of a pathogen in a sample.

### BACKGROUND

[0004] The identification of pathogenic bacteria from patient samples based on colony culture is a traditional pathogen detection method and currently a common method in the clinic. This method requires aseptically drawing a patient's blood or aseptically collecting a patient's body fluid sample, transferring it to a sterile culture bottle for pathogenic bacteria enrichment culture, subsequently seeding it to a plate culture dish, and finally picking a single clone for chromoscopic observation. By performing differential growth experiments on selective media or performing various biochemical tests, the identification of pathogenic bacteria in the patient's sample is achieved according to the phenotypic and physiological characteristics of the pathogenic bacteria. This assay is not only time-consuming (usually requires one to several days of colony enrichment culture), but also lead to negative results because of the harsh culture conditions for some anaerobic pathogenic bacteria or other strains hard to be cultured in common conditions. Meanwhile, contamination may be introduced during the process of bacterial culture and isolation, resulting in false-positive test results, which may lead to misdiagnosis and the misuse of antimicrobial drugs.

[0005] Pneumonia, a disease resulting from invasion and overgrowth of pathogens in the soft tissues of the lungs, can cause unilateral or bilateral lung alveolar inflammation, with the respiratory tract filled with fluid or pus, which in turn triggers dyspnea. It is defined by the World Health Organization (WHO) as an acute respiratory infection affecting the soft tissues and oxygenation of the lungs, and its clinical diagnosis is based on the presence of shadowing on chest X-ray. Currently, pneumonia remains a serious disease that seriously affects public health, with pneumonia accounting for more deaths than any other infectious disease in the United States according to a 2016 mortality trend analysis, and without any improvement during the previous 34 years. Worldwide, the morbidity and mortality of neonatal pneumonia is persistently high, and 152000-490000 infants under the age of one year die from pneumonia every year, making it a veritable “child killer”. Severe pneumonia is a progressive lung inflammation, caused by pulmonary infection leading to a systemic inflammatory response, with the development of the disease worsening, even causing systemic severe infection diseases such as respiratory failure, septic shock, sepsis. Severe pneumonia is defined by the WHO as a patient having cough or dyspnea and symptoms such as lower chest wall adduction or vomiting, impaired consciousness, central cyanosis, or peripheral oxygen saturation less than 90%. Despite the rapid development of antibiotic therapy and life support therapy in recent years, severe pneumonia remains one of the leading causes of intensive care unit admission and death. There are a large variety of pathogenic bacteria causing severe pneumonia, and the resistance of various pathogenic bacteria to different antibiotics is quite different. Current detection technology of clinical pathogenic bacteria is still far from meeting the need for clinical diagnosis and treatment of patients with severe pneumonia.

### SUMMARY

[0006] In one aspect, the present invention provides a method for identifying one or more pathogens, comprising:
[0007] (1) providing a sample that may comprise the pathogen; and
[0008] (2) detecting presence or absence of a pathogen specific nucleic acid fragment in the sample or detecting content of a pathogen specific nucleic acid fragments in the sample,
[0009] wherein a pathogen specific nucleic acid fragment corresponding to Acinetobacter baumannii is selected from at least a part of any sequence of SEQ ID No: 34-49, or a complementary sequence thereof;
[0010] a pathogen specific nucleic acid fragment corresponding to Escherichia coli is selected from at least a part of any sequence of SEQ ID No: 50-221, or a complementary sequence thereof;
[0011] a pathogen specific nucleic acid fragment corresponding to Klebsiella pneumoniae is selected from at least a part of any sequence of SEQ ID No: 222-542, or a complementary sequence thereof;
[0012] a pathogen specific nucleic acid fragment corresponding to Staphylococcus aureus is selected from at least a part of any sequence of SEQ ID No: 543-601, or a complementary sequence thereof;
[0013] a pathogen specific nucleic acid fragment corresponding to Pseudomonas aeruginosa is selected from at least a part of any sequence of SEQ ID No: 602-896, or a complementary sequence thereof;
[0014] a pathogen specific nucleic acid fragment corresponding to Staphylococcus epidermidis is selected from at least a part of any sequence of SEQ ID No: 897-1079, or a complementary sequence thereof;
[0015] a pathogen specific nucleic acid fragment corresponding to Staphylococcus capitis is selected from at least a part of any sequence of SEQ ID No: 1080-1169, or a complementary sequence thereof;
[0016] a pathogen specific nucleic acid fragment corresponding to Enterococcus faecalis is selected from at least a part of any sequence of SEQ ID No: 1170-1279, or a complementary sequence thereof;
[0017] a pathogen specific nucleic acid fragment corresponding to Enterococcus faecium is selected from at least a part of any sequence of SEQ ID No: 1280-1405, or a complementary sequence thereof;
[0018] a pathogen specific nucleic acid fragment corresponding to Stenotrophomonas maltophilia is selected from at least a part of any sequence of SEQ ID No: 1406-1550, or a complementary sequence thereof;
[0019] a pathogen specific nucleic acid fragment corresponding to Mycobacterium tuberculosis, Mycobacterium africanum, or Mycobacterium bovis is selected from at least a part of SEQ ID No: 1551-1590, or a complementary sequence thereof,
[0020] wherein the presence or content of the pathogen specific nucleic acid fragment reflects the presence or content of the pathogen corresponding to the pathogen-specific nucleic acid fragment in the sample, respectively.

[0021] In some embodiments, the step (2) further comprises performing extraction of nucleic acid from the sample prior to the detection.

[0022] In some embodiments, the step (2) comprises performing an amplification reaction using the pathogen specific nucleic acid fragment in the sample as a template, and determining the presence or content of the pathogen-specific nucleic acid fragment by detecting presence or content of amplified product.

[0023] In some embodiments, the amplification reaction is Polymerase Chain Reaction (PCR).

[0024] In some embodiments, in the PCR: primers used for amplification of pathogen specific nucleic acid fragment of Acinetobacter baumannii comprise sequences as set forth in SEQ ID No: 1 and SEQ ID No: 2; primers used for amplification of pathogen specific nucleic acid fragment of Klebsiella pneumoniae comprise sequences as set forth in SEQ ID No: 4 and SEQ ID No: 5; primers used for amplification of pathogen specific nucleic acid fragment of Staphylococcus aureus comprise sequences as set forth in SEQ ID No: 7 and SEQ ID No: 8; primers used for amplification of pathogen specific nucleic acid fragment of Escherichia coli comprise sequences as set forth in SEQ ID No: 10 and SEQ ID No: 11; primers used for amplification of pathogen specific nucleic acid fragment of Pseudomonas aeruginosa comprise sequences as set forth in SEQ ID No: 13 and SEQ ID No: 14; primers used for amplification of pathogen specific nucleic acid fragment of Stenotrophomonas maltophilia comprise sequences as set forth in SEQ ID No: 16 and SEQ ID No: 17; primers used for amplification of pathogen specific nucleic acid fragment of Staphylococcus epidermidis comprise sequences as set forth in SEQ ID No: 19 and SEQ ID No: 20; primers used for amplification of pathogen specific nucleic acid fragment of Enterococcus faecium comprise sequences as set forth in SEQ ID No: 22 and SEQ ID No: 23; primers used for amplification of pathogen specific nucleic acid fragment of Staphylococcus capitis comprise sequences as set forth in SEQ ID No: 25 and SEQ ID No: 26; primers used for amplification of pathogen specific nucleic acid fragment of Enterococcus faecalis comprise sequences as set forth in SEQ ID No: 28 and SEQ ID No: 29; primers used for amplification of pathogen specific nucleic acid fragment of Mycobacterium tuberculosis, Mycobacterium africanum, or Mycobacterium bovis comprise sequences as set forth in SEQ ID No: 31 and SEQ ID No: 32.

[0025] In some embodiments, the detection of amplification product is performed utilizing trans cleavage activity of a nuclease of CRISPR/Cas family.

[0026] In some embodiments, the nuclease of CRISPR/Cas family is Cas12.

[0027] In some embodiments, the nuclease of CRISPR/Cas family is lbCas12.

[0028] In some embodiments, the primers used for amplification of pathogen specific nucleic acid fragment of Acinetobacter baumannii comprise sequences as set forth in SEQ ID No: 1 and SEQ ID No: 2, and a target sequence of crRNA used in combination with the nuclease of CRISPR/Cas family comprises a sequence as set forth in SEQ ID No: 3; the primers used for amplification of pathogen specific nucleic acid fragment of Klebsiella pneumoniae comprise sequences as set forth in SEQ ID No: 4 and SEQ ID No: 5, and a target sequence of crRNA used in combination with the nuclease of CRISPR/Cas family comprises a sequence as set forth in SEQ ID No: 6; the primers used for amplification of pathogen specific nucleic acid fragment of Staphylococcus aureus comprise sequences as set forth in SEQ ID No: 7 and SEQ ID No: 8, and a target sequence of crRNA used in combination with the nuclease of CRISPR/Cas family comprises a sequence as set forth in SEQ ID No: 9; the primers used for amplification of pathogen specific nucleic acid fragment of Escherichia coli comprise sequences as set forth in SEQ ID No: 10 and SEQ ID No: 11, and a target sequence of crRNA used in combination with the nuclease of CRISPR/Cas family comprises a sequence as set forth in SEQ ID No: 12; the primers used for amplification of pathogen specific nucleic acid fragment of Pseudomonas aeruginosa comprise sequences as set forth in SEQ ID No: 13 and SEQ ID No: 14, and a target sequence of crRNA used in combination with the nuclease of CRISPR/Cas family comprises a sequence as set forth in SEQ ID No: 15;
[0029] the primers used for amplification of pathogen specific nucleic acid fragment of Stenotrophomonas maltophilia comprise sequences as set forth in SEQ ID No: 16 and SEQ ID No: 17, and a target sequence of crRNA used in combination with the nuclease of CRISPR/Cas family comprises a sequence as set forth in SEQ ID No: 18;
[0030] the primers used for amplification of pathogen specific nucleic acid fragment of Staphylococcus epidermidis comprise sequences as set forth in SEQ ID No: 19 and SEQ ID No: 20, and a target sequence of crRNA used in combination with the nuclease of CRISPR/Cas family comprises a sequence as set forth in SEQ ID No: 21;
[0031] the primers used for amplification of pathogen specific nucleic acid fragment of Enterococcus faecium comprise sequences as set forth in SEQ ID No: 22 and SEQ ID No: 23, and a target sequence of crRNA used in combination with the nuclease of CRISPR/Cas family comprises a sequence as set forth in SEQ ID No: 24;
[0032] the primers used for amplification of pathogen specific nucleic acid fragment of Staphylococcus capitis comprise sequences as set forth in SEQ ID No: 25 and SEQ ID No: 26, and a target sequence of crRNA used in combination with the nuclease of CRISPR/Cas family comprises a sequence as set forth in SEQ ID No: 27;
[0033] the primers used for amplification of pathogen specific nucleic acid fragment of Enterococcus faecalis comprise sequences as set forth in SEQ ID No: 28 and SEQ ID No: 29, and a target sequence of crRNA used in combination with the nuclease of CRISPR/Cas family comprises a sequence as set forth in SEQ ID No: 30;
[0034] the primers used for amplification of pathogen specific nucleic acid fragment of Mycobacterium tuberculosis, Mycobacterium africanum, or Mycobacterium bovis comprise sequences as set forth in SEQ ID No: 31 and SEQ ID No: 32, and a target sequence of crRNA used in combination with the nuclease of CRISPR/Cas family comprises a sequence as set forth in SEQ ID No: 33.

[0035] In some embodiments, the sample is sputum or alveolar lavage fluid from a patient with severe pneumonia.

[0036] In some embodiments, identification is performed in step (2) for a plurality of pathogens, including Acinetobacter baumannii, Escherichia coli, Klebsiella pneumoniae, Staphylococcus aureus, Pseudomonas aeruginosa, Staphylococcus epidermidis, Staphylococcus capitis, Enterococcus faecalis, Enterococcus faecium, and Stenotrophomonas maltophilia.

[0037] In some embodiments, the plurality of pathogens further comprise Mycobacterium tuberculosis, Mycobacterium africanum, or Mycobacterium bovis.

[0038] In another aspect, the present invention provides an isolated nucleic acid molecule comprising at least a part of any sequence of SEQ ID No: 34-1590, or a complementary sequence thereof.

[0039] In some embodiments, the nucleic acid molecule has a length of not less than 60 nucleotides.

[0040] In another aspect, the present invention provides a kit for detection of pathogen in a sample, comprising
[0041] (1) primers for amplification of pathogen specific nucleic acid fragments in the sample to generate amplification product; and
[0042] (2) a nuclease of CRISPR/Cas family with trans cleavage activity, a crRNA using at least a part of sequence of the amplification product as target sequence, and a single-stranded DNA reporter molecule with a fluorophore and a quencher group at the 5′ and 3′ ends, respectively, wherein
[0043] a pathogen specific nucleic acid fragment corresponding to Acinetobacter baumannii is selected from at least a part of any sequence of SEQ ID No: 34-49, or a complementary sequence thereof; a pathogen specific nucleic acid fragment corresponding to Escherichia coli is selected from at least a part of any sequence of SEQ ID No: 50-221, or a complementary sequence thereof; a pathogen specific nucleic acid fragment corresponding to Klebsiella pneumoniae is selected from at least a part of any sequence of SEQ ID No: 222-542, or a complementary sequence thereof; a pathogen specific nucleic acid fragment corresponding to Staphylococcus aureus is selected from at least a part of any sequence of SEQ ID No: 543-601, or a complementary sequence thereof, a pathogen specific nucleic acid fragment corresponding to Pseudomonas aeruginosa is selected from at least a part of any sequence of SEQ ID No: 602-896, or a complementary sequence thereof, a pathogen specific nucleic acid fragment corresponding to Staphylococcus epidermidis is selected from at least a part of any sequence of SEQ ID No: 897-1079, or a complementary sequence thereof, a pathogen specific nucleic acid fragment corresponding to Staphylococcus capitis is selected from at least a part of any sequence of SEQ ID No: 1080-1169, or a complementary sequence thereof, a pathogen specific nucleic acid fragment corresponding to Enterococcus faecalis is selected from at least a part of any sequence of SEQ ID No: 1170-1279, or a complementary sequence thereof, a pathogen specific nucleic acid fragment corresponding to Enterococcus faecium is selected from at least a part of any sequence of SEQ ID No: 1280-1405, or a complementary sequence thereof, a pathogen specific nucleic acid fragment corresponding to Stenotrophomonas maltophilia is selected from at least a part of any sequence of SEQ ID No: 1406-1550, or a complementary sequence thereof, and a pathogen specific nucleic acid fragment corresponding to Mycobacterium tuberculosis, Mycobacterium africanum, or Mycobacterium bovis is selected from at least a part of any sequence of SEQ ID No: 1551-1590, or a complementary sequence thereof.

[0044] In some embodiments, the kit further comprises the above nucleic acid fragment as a positive control.

[0045] In some embodiments, the nuclease of CRISPR/Cas family is lbCas12.

[0046] In some embodiments, the primers used for amplification of pathogen specific nucleic acid fragment of Acinetobacter baumannii comprise sequences as set forth in SEQ ID No: 1 and SEQ ID No: 2; the primers used for amplification of pathogen specific nucleic acid fragment of Klebsiella pneumoniae comprise sequences as set forth in SEQ ID No: 4 and SEQ ID No: 5; the primers used for amplification of pathogen specific nucleic acid fragment of Staphylococcus aureus comprise sequences as set forth in SEQ ID No: 7 and SEQ ID No: 8; the primers used for amplification of pathogen specific nucleic acid fragment of Escherichia coli comprise sequences as set forth in SEQ ID No: 10 and SEQ ID No: 11; the primers used for amplification of pathogen specific nucleic acid fragment of Pseudomonas aeruginosa comprise sequences as set forth in SEQ ID No: 13 and SEQ ID No: 14; the primers used for amplification of pathogen specific nucleic acid fragment of Stenotrophomonas maltophilia comprise sequences as set forth in SEQ ID No: 16 and SEQ ID No: 17; the primers used for amplification of pathogen specific nucleic acid fragment of Staphylococcus epidermidis comprise sequences as set forth in SEQ ID No: 19 and SEQ ID No: 20; the primers used for amplification of pathogen specific nucleic acid fragment of Enterococcus faecium comprise sequences as set forth in SEQ ID No: 22 and SEQ ID No: 23; the primers used for amplification of pathogen specific nucleic acid fragment of Staphylococcus capitis comprise sequences as set forth in SEQ ID No: 25 and SEQ ID No: 26; the primers used for amplification of pathogen specific nucleic acid fragment of Enterococcus faecalis comprise sequences as set forth in SEQ ID No: 28 and SEQ ID No: 29; the primers used for amplification of pathogen specific nucleic acid fragment of Mycobacterium tuberculosis, Mycobacterium africanum, or Mycobacterium bovis comprise sequences as set forth in SEQ ID No: 31 and SEQ ID No: 32.

[0047] In some embodiments, the primers used for amplification of pathogen specific nucleic acid fragment of Acinetobacter baumannii comprise sequences as set forth in SEQ ID No: 1 and SEQ ID No: 2, and a target sequence of the crRNA comprises a sequence as set forth in SEQ ID No: 3; the primers used for amplification of pathogen specific nucleic acid fragment of Klebsiella pneumoniae comprise sequences as set forth in SEQ ID No: 4 and SEQ ID No: 5, and a target sequence of the crRNA comprises a sequence as set forth in SEQ ID No: 6; the primers used for amplification of pathogen specific nucleic acid fragment of Staphylococcus aureus comprise sequences as set forth in SEQ ID No: 7 and SEQ ID No: 8, and a target sequence of the crRNA comprises a sequence as set forth in SEQ ID No: 9; the primers used for amplification of pathogen specific nucleic acid fragment of Escherichia coli comprise sequences as set forth in SEQ ID No: 10 and SEQ ID No: 11, and a target sequence of the crRNA comprises a sequence as set forth in SEQ ID No: 12; the primers used for amplification of pathogen specific nucleic acid fragment of Pseudomonas aeruginosa comprise sequences as set forth in SEQ ID No: 13 and SEQ ID No: 14, and a target sequence of the crRNA comprises a sequence as set forth in SEQ ID No: 15; the primers used for amplification of pathogen specific nucleic acid fragment of Stenotrophomonas maltophilia comprise sequences as set forth in SEQ ID No: 16 and SEQ ID No: 17, and a target sequence of the crRNA comprises a sequence as set forth in SEQ ID No: 18; the primers used for amplification of pathogen specific nucleic acid fragment of Staphylococcus epidermidis comprise sequences as set forth in SEQ ID No: 19 and SEQ ID No: 20, and a target sequence of the crRNA comprises a sequence as set forth in SEQ ID No: 21; the primers used for amplification of pathogen specific nucleic acid fragment of Enterococcus faecium comprise sequences as set forth in SEQ ID No: 22 and SEQ ID No: 23, and a target sequence of the crRNA comprises a sequence as set forth in SEQ ID No: 24; the primers used for amplification of pathogen specific nucleic acid fragment of Staphylococcus capitis comprise sequences as set forth in SEQ ID No: 25 and SEQ ID No: 26, and a target sequence of the crRNA comprises a sequence as set forth in SEQ ID No: 27; the primers used for amplification of pathogen specific nucleic acid fragment of Enterococcus faecalis comprise sequences as set forth in SEQ ID No: 28 and SEQ ID No: 29, and a target sequence of the crRNA comprises a sequence as set forth in SEQ ID No: 30; the primers used for amplification of pathogen specific nucleic acid fragment of Mycobacterium tuberculosis, Mycobacterium africanum, or Mycobacterium bovis comprise sequences as set forth in SEQ ID No: 31 and SEQ ID No: 32, and a target sequence of the crRNA comprises a sequence as set forth in SEQ ID No: 33.

[0048] In some embodiments, the sample is sputum or alveolar lavage fluid from a patient with severe pneumonia.

[0049] In some embodiments, the kit is used for detection of Acinetobacter baumannii, Escherichia coli, Klebsiella pneumoniae, Staphylococcus aureus, Pseudomonas aeruginosa, Staphylococcus epidermidis, Staphylococcus capitis, Enterococcus faecalis, Enterococcus faecium, and Stenotrophomonas maltophilia in the sample.

[0050] In some embodiments, the kits are used for detection of Acinetobacter baumannii, Escherichia coli, Klebsiella pneumoniae, Staphylococcus aureus, Pseudomonas aeruginosa, Staphylococcus epidermidis, Staphylococcus capitis, Enterococcus faecalis, Enterococcus faecium, and Stenotrophomonas maltophilia in the sample and Mycobacterium tuberculosis, Mycobacterium africanum, or Mycobacterium bovis in the sample.

[0051] The pathogen specific nucleic acid fragments presented herein can be used for rapid identification of pathogens with high positive detection rate and short detection period (e.g. less than 3 hours) in clinical application.

### DESCRIPTION OF DRAWINGS

[0052] FIG. 1 shows a flowchart of the method described herein for obtaining pathogen-specific nucleic acid fragments.

[0053] FIG. 2 shows a schematic diagram showing the trans cleavage activity of Cas12a.

[0054] FIG. 3 shows a specific nucleic acid fragment of Acinetobacter baumannii, with the position of corresponding primers, crRNA target sequence and PAM sequence indicated.

[0055] FIG. 4 shows the electrophoresis results of the amplified products after amplification of DNA templates from various pathogens with 10 pairs of amplification primers. M: 250 bp gradient ladder; Lanes 1-10 in turn indicate the genomic DNA templates amplified by PCR for each group as follows: Lane 1: Acinetobacter baumannii; Lane 2: Escherichia coli; Lane 3: Klebsiella pneumoniae; Lane 4: Staphylococcus aureus; Lane 5: Pseudomonas aeruginosa; Lane 6: Staphylococcus epidermidis; Lane 7: Staphylococcus capitis; Lane 8: Enterococcus faecalis; Lane 9: Enterococcus faecium; Lane 10: Stenotrophomonas maltophilia; NC was the negative control, i.e. the template was deionized water.

[0056] FIG. 5 shows the results of fluorescence signal detection of different amplification products with lbCas12a and crRNA. Each set of crRNA was used to detect the PCR products amplified by corresponding primers, and the horizontal ordinate 1-10 represented the amplified products from the following pathogens, respectively: Lane 1: Acinetobacter baumannii; Lane 2: Escherichia coli; Lane 3: Klebsiella pneumoniae; Lane 4: Staphylococcus aureus; Lane 5: Pseudomonas aeruginosa; Lane 6: Staphylococcus epidermidis; Lane 7: Staphylococcus capitis; Lane 8: Enterococcus faecalis; Lane 9: Enterococcus faecium; Lane 10: Stenotrophomonas maltophilia; NC was the negative control, i.e. the template for PCR was deionized water. Error bars represent the mean±S.E.M. of fluorescence signals, with 3 replicates per group.

[0057] FIG. 6 shows the results of the distribution of pathogenic bacteria identified using lbCas12a for the patient's clinical sample after nucleic acid amplification. PC: positive control, i.e., subjects with pathogenic bacterial genomic DNA; the heat map indicates the percentage of the mean fluorescence values for each group of reactions; the symbol #represents a positive result for the conventional culture method.

### DETAILED DESCRIPTION OF EMBODIMENTS

[0058] Unless otherwise stated, all technical and scientific terms as used herein have the meanings commonly understood by those of ordinary skill in the art.

### Pathogen Specific Nucleic Acid Fragments

[0059] “pathogen specific nucleic acid fragments”, also referred to as pathogenic bacteria or pathogen specific nucleic acid fragments (usually referring to DNA sequences and can also comprise RNA sequences), refer to: DNA sequences that are all widely present in the genomes of strains taxonomically belonging to the same pathogens, but that are not present in the genomes of other species of pathogens, that is, intra-specie consensus inter-specie specific DNA sequences. The species of bacteria can be clearly delineated on the basis of DNA sequences unique to pathogenic bacteria.

[0060] In some embodiments, DNA sequences specific to pathogenic bacteria are obtained herein by the following steps (see FIG. 1):
[0061] 1) Obtaining whole genome sequences: whole genome sequences of hundreds of common microorganisms were obtained from public databases such as NCBI;
[0062] 2) Acquisition of intraspecific consensus sequence of the same species of bacteria: the whole genome sequences obtained were used to build a database and to perform multiple sequence alignment analysis; firstly, a sequence with high accuracy (high sequencing quality) of a bacterial whole genome sequence was used as the target sequence, and the whole genome sequences of other strains belonging to the same species of bacteria were compared with each other to obtain the consensus sequence between the two, and then multiple sequence alignment and comprehensive analysis were performed on the consensus sequences to obtain the overlap sequence, which was the intraspecific consensus sequence of the species;
[0063] 3) Acquisition of inter-specie specific sequences: three BLAST comparisons of the obtained intraspecies consensus sequence of each bacterium with the intraspecies consensus sequence of all bacteria, all bacterial genome sequences (excluding self-alignment when comparing), and human genome (hg19) sequence were performed, then the non-overlapping sequences were used as interspecies specific sequences, which were the unique DNA sequences of pathogenic bacteria.
[0064] 4) Removal of repetitive sequences: repetitive sequences were masked using tools such as RepeatMasker.

[0065] In this way, we obtained a plurality of specific nucleic acid fragments of a variety of bacteria, and their nucleotide sequences are set forth in SEQ ID No: 34-1590, respectively, in which each bacterium could have a plurality of specific nucleic acid fragments.

[0066] After the sequences of these pathogen specific nucleic acid fragments are obtained, they can be conveniently used to perform the detection of various pathogens in patients or patient samples. For example, the presence of a specific pathogen specific nucleic acid fragment could be used to indicate the inclusion of that particular pathogen in a patient or patient sample; the content of a particular pathogen specific nucleic acid fragment can be used to indicate the content of that particular pathogen in a patient or patient sample. The sequences of these pathogen specific nucleic acid fragments may themselves also be included in some assay kits, for example as positive controls. Understandably, during the assay, the full length of these specific nucleic acid fragments (SEQ ID No: 34-1590) provided herein can be detected; alternatively, only a part of its fragments, such as those of 50, 60, 80, 100 nucleotides or more in length, are detected. Similarly, the pathogen specific nucleic acid fragments included in the kit may also be full-length fragments or partial fragments (e.g. fragments of 50, 60, 80, 100 nucleotides or more in length). In some preferred embodiments, the length of the pathogen specific nucleic acid fragment is at least 60 nucleotides.

### Nucleic Acid Amplification

[0067] The application of nucleic acid amplification technology has changed the way of microbial pathogens diagnosis, and is also a common molecular biology technique used. In the 1980s, a variety of techniques for DNA amplification successively emerged, mainly including polymerase chain reaction (PCR) technique, ligase chain reaction (LCR) technique, as well as isothermal amplification.

[0068] The discovery and application of DNA polymerases with high-temperature resistance properties have made PCR the most commonly used DNA amplification technique. The principle of PCR technology to detect pathogenic microorganisms is to utilize specific oligonucleotide strands as primers and target nucleic acids containing the sequence to be amplified as templates to achieve exponential amplification of double stranded DNA by constantly switching the temperature, resulting in a large number of DNA fragments of interest (ie, amplification products) for subsequent identification. The advantages of this technique are its high sensitivity and easy operation, which can complete the detection of very trace amounts of pathogenic bacteria, which is essential for the detection of pathogenic microorganisms characterized by long growth cycles, harsh culture conditions or biochemical reactions.

[0069] LCR is another in vitro amplification technique developed after the advent of PCR technology. The principle of this technique is that: using a high temperature resistant DNA ligase and four primers, two adjacent forward primers and two reverse primers paired with their reverse complement. There is usually 1 gap between the two adjacent primers, which serves as a template for DNA ligase ligation. DNA ligase specificity is high and base mismatches are not tolerated, so this technique is frequently used for the detection of SNPs.

[0070] Isothermal amplification of nucleic acids is a facile technique that allows rapid and efficient accumulation of nucleic acid sequences at a constant temperature, and a variety of isothermal amplification techniques have been developed since the early 1990s as an alternative to PCR. In contrast to PCR techniques, isothermal amplification techniques, which do not require complicated thermal cycling processes (and therefore reduce the cost of amplification), enable amplification reactions at only one specific temperature. Isothermal amplification techniques commonly used in the art include: nucleic acid sequence based amplification (NASBA), strand displacement amplification (SDA), recombinase polymerase amplification (RPA), helicase dependent isothermal DNA amplification (HDA) Loop mediated isothermal amplification (lamp), rolling circle amplification (RCA), and others. These isothermal amplification techniques are well known to those skilled in the art and are not further described here.

[0071] In some embodiments herein, nucleic acids in a sample may be amplified prior to detection of pathogen specific nucleic acid fragments to increase the sensitivity of detection.

### CRISPR/Cas Genome Editing System and Trans Cleavage Activity of Cas12a

[0072] The CRISPR/Cas system has the potential for targeted cleavage of nucleic acid molecules, and genome editing tools based on this system are progressively being developed and utilized in significant quantities. Currently, genome editing tool applications based on CRISPR/Cas9 and CRISPR/Cas12a systems are the most prevalent. Their working principles are briefly described as follows: first, with the guidance of an RNA molecule, Cas proteins directionally cleave the double stranded DNA of a target gene, causing the integrity of the DNA strand to be disrupted; The corresponding DNA repair system within the cell is then activated, mainly including the NHEJ repair mechanism versus the HDR repair mechanism, thereby completing the destruction or directed remodeling of the target genes.

[0073] Compared with previous genome editing tools, CRISPR/Cas based genome editing technology has considerable advantages: it is simple in composition and consists of only one Cas protein along with sgRNA (for cas12a, only crRNA), so that editing targeting different loci requires only changing different sgRNAs (or just changing the seed region sequence in which the target nucleic acid binds). Functional studies of multiple genes can be made possible by designing multiple pairs of sgRNAs to achieve simultaneous editing of multiple gene loci.

[0074] Recently, Cas12a was found to has not only cis cleavage activity for targeted cleavage of DNA, but also trans cleavage activity for nonspecific cleavage of arbitrary single stranded DNA (see FIG. 2). Upon binding to the target DNA with reverse complementary pairing of the crRNA, the Cas12a crRNA complex provokes Cas12a's trans cleavage activity, resulting in Cas12a indiscriminate cleavage of an arbitrary single stranded DNA molecule in the vicinity (i.e., without sequence specificity). Therefore, in the presence of a single stranded reporter DNA molecule, the trans cleavage activity of Cas12a can be exploited to detect the target DNA molecule. The detection process includes, for example: first utilizing exponential amplification of the target DNA in the sample to be tested by techniques such as PCR or RPA to increase the sensitivity of the assay; The amplified products are then examined using Cas12a, crRNA as well as single stranded reporter DNA, and if a DNA sequence corresponding to the seed region of crRNA is present in the amplification product (a PAM sequence such as ttta is also present 5′ upstream), the trans cleavage activity of Cas12a will be excited to cleave the reporter DNA, resulting in a fluorescent signal.

[0075] In some embodiments, the crRNA used in conjunction with Cas12crRNA consists of a 21-nt backbone and a 20- to 24-nt seed region/spacer for target sequence recognition. In a more specific embodiment, the sequence of the crRNA is: 5′-UAAUUUCUA CUAAGUGUAGAU (backbone region, SEQ ID No: 1591)+20-24 nt seed region-3′. In some embodiments, the corresponding crRNA can be transcribed in vitro with T7 RNA polymerase by using DNA as a template, and pure crRNA can be obtained by purification.

[0076] Single stranded reporter DNA molecules have a fluorescent group modification at one end and a quencher group modification at the other end. Due to the presence of the quencher group, the intact single stranded reporter DNA molecule does not produce a fluorescent signal. After cleaved by the trans cleavage activity of cas12a, the quencher group is separated from the fluorescent group, resulting in a fluorescent signal. The presence or intensity of the fluorescent signal is suggestive of the absence or amount of amplified product.

[0077] In this study, we first utilized bioinformatics methods to obtain intraspecific DNA sequences of several microorganisms, and specific crRNA for targeted identification of pathogenic bacteria were designed and synthesized according to these sequences. Next, we utilized Escherichia coli prokaryotic expression to purify lbCas12a protein derived from Lachnospiraceae bacterium, verifying that the protein possesses cis and trans cleavage activity. Subsequently, a CRISPR/Cas12a based assay for pathogenic bacteria was developed using single stranded reporter DNA, lbCas12a protein with specific crRNA, assisted by PCR amplification, and validated using 10 common severe pneumonia pathogens as an example and found to be successful in detecting these pathogens based on the specie-specific nucleic acid sequences of each pathogen, and its accuracy and specificity were verified. Ultimately, rapid detection of clinical samples from patients with severe pneumonia was achieved within 3 hours using CRISPR/Cas12a based pathogen detection tools. The CRISPR/Cas12a based detection method for pathogenic bacteria provided herein is expected to become a novel and rapid method for clinical pathogenic bacteria identification and provide an important technical support to improve the diagnosis and treatment of severe pneumonia.

[0078] In some embodiments herein, the trans cleavage activity of Cas12a is exploited to enable detection of pathogen specific nucleic acid fragments or their amplified products, which further increases the specificity of detection due to the requirement for complementary pairing of the crRNA with the target DNA.

[0079] the present invention will be further described in detail through specific embodiments.

### Example 1. Validation of the CRISPR/Cas Based Method for the Detection of Pathogenic Bacteria

[0080] The pathogenic bacteria used for the detection were all obtained from the intensive care unit of Drum Tower Hospital. The clinical samples were from patients with severe pneumonia, and were isolated and cultured by the Department of microbiological examination of Drum Tower Hospital to determine the strain species (each pathogenic bacterium had two strains, which were derived from different patients).

TABLE 1
the isolated and cultured strains of pathogenic bacteria

| NO. | Latin name | Short name |
|---|---|---|
| 1 | Acinetobacter baumannii | Aci_ba |
| 2 | Escherichia coli [symbol] | E. coli |
| 3 | Klebsiella pneumoniae | Kle_pn |
| 4 | Staphylococcus aureus | Sta_au |
| 5 | Pseudomonas aeruginosa | Pse_ae |
| 6 | Staphylococcus epidermidis | Sta_ep |
| 7 | Staphylococcus capitis | Sta_ca |
| 8 | Enterococcus faecalis | Ent_fa-is |
| 9 | Enterococcus faecium | Ent_fa-um |
| 10 | Stenotrophomonas maltophilia | Ste_ma |

### 1. Specificity Test

[0081] To demonstrate the specificity and reliability of the CRISPR/Cas system based assay for pathogenic bacteria, the primers for amplification and corresponding crRNA were tested for cross validation.

### 1.1 Primer Specificity Test

[0082] To validate the specificity of the amplification primers, each set of primers was used in a cross reaction with extracted genomic DNA from 10 bacteria.

[0083] The forward and reverse primers among the amplification primers used were:
[0084] SEQ ID No: 1 and 2 for amplification of genomic DNA from Acinetobacter baumannii;
[0085] SEQ ID No: 4 and 5 for amplification of genomic DNA from Klebsiella pneumoniae;
[0086] SEQ ID No: 7 and 8 for amplification of genomic DNA from Staphylococcus aureus;
[0087] SEQ ID No: 10 and 11 for amplification of genomic DNA from Escherichia coli;
[0088] SEQ ID No: 13 and 14 for amplification of genomic DNA from Pseudomonas aeruginosa;
[0089] SEQ ID No: 16 and 17 for amplification of genomic DNA from Stenotrophomonas maltophilia;
[0090] SEQ ID No: 19 and 20 for amplification of genomic DNA from Staphylococcus epidermidis;
[0091] SEQ ID No: 22 and 23 for amplification of genomic DNA from Enterococcus faecium;
[0092] SEQ ID No: 25 and 26 for amplification of genomic DNA from Staphylococcus capitis;
[0093] And SEQ ID No: 28 and 29 for amplification of genomic DNA from Enterococcus faecalis.

[0094] The target sequences (or seed regions) of crRNA used in combination with the above primer pairs were as set forth in SEQ ID No: 3, 6, 9, 12, 15, 18, 21, 24, 27, and 30.

[0095] FIG. 3 shows an example of a specific pathogen specific nucleic acid fragment (from Acinetobacter baumannii, SEQ ID No: 36) to design amplification primers and crRNA sequences in which sequences corresponding to upstream primer and downstream primer (SEQ ID No: 1 and 2) are underlined, target sequence of crRNA (SEQ ID No: 3) is double underlined, and PAM sequence is boxed.

[0096] PCR was performed using I-5™ Master Mix (Tsingke). Since this polymerase readily produces nonspecific amplicons when amplifying fragments from Escherichia coli and Staphylococcus aureus DNA, we used 2×T5 Super PCR Mix (Tsingke) and TIANSeq HiFi Amplification Mix (Tiangen) for these two instead.

[0097] I-5™ Master Mix PCR reaction system:

| | | |
|---|---|---|
| 1-5 ™ 2 × High-Fidelity Master Mix | 25 | μl |
| Template | 2-10 | ng |
| Forward primer (10 μM) | 2 | μl |
| Reverse primer (10 μM) | 2 | μl |

| | |
|---|---|
| ddH₂O | to 50 μl |

[0098] 2×T5 Super PCR Mix PCR reaction system:

| | | |
|---|---|---|
| 2 × T5 Super PCR Mix | 25 | μl |
| Template | 50-100 | ng |
| Forward primer (10 μM) | 2 | μl |
| Reverse primer (10 μM) | 2 | μl |

| | |
|---|---|
| ddH₂O | to 50 μl |

[0099] TIANSeq HiFi Amplification Mix PCR reaction system:

| | | |
|---|---|---|
| 2 × HiFi Amplification Mix | 25 | μl |
| Template | 10-50 | ng |
| Forward primer(10 μM) | 2 | μl |
| Reverse primer(10 μM) | 2 | μl |

| | |
|---|---|
| ddH₂O | to 50 μl |

[0100] PCR reaction system:

| | | | | |
|---|---|---|---|---|
| 98° C. | 2 | min | | |
| 98° C. | 10 | s | | |
| 52° C. | 10 | s | {close oversize brace} | 35 cycles |
| 72° C. | 15 | s | | |
| 72° C. | 5 | min | | |

| | |
|---|---|
| 4° C. | Pause |

[0101] Corresponding negative controls were set up with each set of primers, in which water was used as template.

[0102] After the PCR reaction was completed, products were mixed with corresponding volume of 6× Gel loading dye (NEB) and separated by agarose electrophoresis. Primer specificity was validated according to the electrophoresis results with or without a distinct bright band of the target DNA sizes.

1.2 crRNA Specificity Test

[0103] The PCR products amplified by the corresponding primers were detected using lbCas12a and the above crRNA designed according to the specie-specific DNA sequence of each pathogen. Three replicates were set up for each sample.

### Reaction System:

| | | |
|---|---|---|
| ssDNA-reporter (10 μM) | 1 | μl |
| PCR products/unpurified | 1-2 | μl |
| PCR reaction solution | | |
| 10 × NEBuffer ™ 3.1 | 2 | μl |
| lbCas12a | 1300 | ng |
| crRNA | 180 | ng |

| | |
|---|---|
| ddH₂O | to 20 μl |

[0105] in which the structure of the ssDNA reporter is: 5′-FAM-TTATT-BHQ1-3′.

[0106] The above reaction was added to a 384-well plate and incubated for 30˜45 min at 37° C. After the reaction, the fluorescence value of each well was detected using a microplate reader (infinite M200 Pro multi-purpose microplate reader, Austria TECAN) with the following detection parameters set:

| Excitation Wavelength | 485 | nm |
|---|---|---|
| Emission Wavelength | 535 | nm |
| Excitation Bandwidt | 9 | nm |
| Emission Bandwidth | 20 | nm |
| Gain | 100 | Manual |
| Number of Flashes | 25 | |
| Integration Time | 20 | μs |
| Lag Time | 0 | μs |
| Settle Time | 0 | ms |
| Z-Position (Manual) | 20000 | μm |

### 2. Experimental Results

### 2.1 Results of Primer Specificity Validation Test

[0107] As shown in FIG. 4, although there were individual nonspecific bands, a large number of DNA products of interest could be amplified when the corresponding pathogenic bacteria genomic DNA was used as the template, illustrating the good specificity of primers for 10 pathogenic bacteria.

2.2 Results of crRNA Specificity Validation Test

[0108] The PCR reaction liquid after amplification with the above corresponding primers was tested using lbCas12a along with the crRNA corresponding to each pathogenic bacterium. The fluorescence results in FIG. 5 show that the crRNA of each pathogenic bacterium can only show obvious fluorescent signals when detecting the PCR products amplified with this pathogenic bacterium as a template and the corresponding primers, indicating that the combination with crRNA makes the specificity of this detection method excellent.

### Example 2. Detection of Clinical Samples from Patients with Severe Pneumonia Using CRISPR/Cas System

### 1. Experimental Protocol

[0109] The 12 clinical samples (sputum or alveolar lavage fluid) were all obtained from the intensive care unit of Drum Tower Hospital and contrasted with the types of pathogenic bacteria identified by the Department of Microbiology Laboratory of Drum Tower Hospital using traditional culture assays.

1.1 DNA Extraction from Clinical Samples by the Kit

[0110] The extraction of DNA from clinical samples was performed with reference to the Quick-DNA/RNA™ Pathogen Miniprep Kit ((ZYMO RESEARCH) according to the manual introduction:
[0111] a) 50-200 μl of sample were pipetted, and 800 μl DNA/RNA shield reagent was added, followed by vortex for 60 s.
[0112] b) The sample was centrifuged at 16,000×g for 1 min and 200 μl supernatant was collected.
[0113] c) 2.0 μl proteinase K reagent were added to 200 μl of the supernatant, and mixed well.
[0114] d) 1 ml of pathogen DNA/RNA buffer reagent were added, mixed and then incubated for 5 min at room temperature.
[0115] e) The above solution was pipetted to the DNA binding column (which had been placed in a recovery tube), centrifuged for 30 s, and the solution passing through the column was discarded.
[0116] f) 500 μl of pathogen DNA/RNA wash buffer were added to the column, centrifuged for 30 s, and the solution passing through the column was discarded. This step was repeated once.
[0117] g) 500 μl ethanol (95-100%) were added to the column, centrifuged at 16,000×g for 1 min to ensure ethanol was eliminated completely. The recovery tube was discarded and the DNA binding column was placed in a DNase free 1.5 ml centrifuge tube.
[0118] h) 50 μl of double-distilled water at 65° C. were pipetted into the matrix of the column, stood alone for 2˜5 min, centrifuged at 16,000×g for 1 min, then the eluate was collected.
[0119] i) The DNA concentration was determined, and the sample was stored at −20° C. freezer.

### 1.2 PCR Reaction to Amplify Target Sequences

[0120] Using extracted total DNA from clinical samples as template, each of them was amplified using the 10 primer pairs described in Example 1. For each pair of primers, the template used for the positive control group was the corresponding genomic DNA of pathogenic bacteria, and the template for the negative control group was water.

[0121] The PCR reaction system was the same as demonstrated in Example 1.

### 1.3 Cas12a Detection

[0122] Unpurified PCR reaction solution was detected using lbCas12a, crRNA and ssDNA reporter. For the same sample to be tested, 3 replicates were set up; The detection reaction system and reaction conditions were the same as demonstrated in Example 1.

### 2. Experimental Results

[0123] PCR amplification was performed on total DNA from 12 clinical samples of patients with severe pneumonia using 10 pairs of amplification primers, followed by detection of the corresponding PCR reaction using single stranded reporter DNA, lbCas12a and relative crRNA for 10 pathogens. The fluorescence signal heat map is shown in FIG. 6. From the figure, the pathogenic bacteria based on CRISPR/Cas12a detection for clinical sample No. 1 were Acinetobacter baumannii and Klebsiella pneumoniae, those in clinical samples No. 2, 3, and 11 were Acinetobacter baumannii, those in clinical sample No. 4 were Klebsiella pneumoniae, Enterococcus faecalis, Enterococcus faecium and Pseudomonas aeruginosa, those in clinical sample No. 5 were Acinetobacter baumannii, Pseudomonas aeruginosa and Klebsiella pneumoniae, those in clinical samples No. 6 and 8 were Klebsiella pneumoniae, those in clinical sample No. 7 were Acinetobacter baumannii, Escherichia coli and Pseudomonas aeruginosa, those in clinical sample No. 9 were Acinetobacter baumannii and Pseudomonas aeruginosa, clinical sample No. 10 had a weak fluorescent signal when tested for Staphylococcus aureus and may have a small content of Staphylococcus aureus, and those in sample 12 were Acinetobacter baumannii and Staphylococcus aureus.

[0124] When compared with the traditional assay based on the culture of isolated colonies, 8 out of 12 samples showed consistent results. The differences were the detection of Pseudomonas aeruginosa, Enterococcus faecalis and Enterococcus faecium in clinical sample No. 4, the absence of Acinetobacter baumannii in clinical sample No. 6, the detection of Pseudomonas aeruginosa in clinical sample No. 9 and a small amount of Staphylococcus aureus in clinical sample No. 10, which was later shown to have a small amount of Staphylococcus aureus in clinical sample No. 10 by genetic sequencing.

[0125] In conclusion, the developed CRISPR/cas12a based pathogenic bacteria detection tool in this study exhibited a very high positive detection rate (11/12, 91.67%) compared with traditional detection methods that rely on the isolation and culture of pathogenic bacteria, which shortened the traditional detection cycle from several days to less than 3 hours, providing preliminary evidence that this assay can be used as a potential test for rapid diagnosis of severe pneumonia pathogenic bacteria types. In addition, based on the specie-specific nucleic acid fragments of numerous pathogens presented herein, similar approaches can be employed for the identification of a variety of other infectious diseases other than pneumonia associated pathogens.

1: A method for identifying one or more pathogens, comprising:
1) providing a sample that may comprise the pathogen; and
2) detecting presence or absence of a pathogen specific nucleic acid fragment in the sample or detecting content of a pathogen specific nucleic acid fragment in the sample,
wherein a pathogen specific nucleic acid fragment corresponding to Acinetobacter baumannii is selected from at least a part of any sequence of SEQ ID No: 34-49, or a complementary sequence thereof;
a pathogen specific nucleic acid fragment corresponding to Escherichia coli is selected from at least a part of any sequence of SEQ ID No: 50-221, or a complementary sequence thereof;
a pathogen specific nucleic acid fragment corresponding to Klebsiella pneumoniae is selected from at least a part of any sequence of SEQ ID No: 222-542, or a complementary sequence thereof;
a pathogen specific nucleic acid fragment corresponding to Staphylococcus aureus is selected from at least a part of any sequence of SEQ ID No: 543-601, or a complementary sequence thereof;
a pathogen specific nucleic acid fragment corresponding to Pseudomonas aeruginosa is selected from at least a part of any sequence of SEQ ID No: 602-896, or a complementary sequence thereof;
a pathogen specific nucleic acid fragment corresponding to Staphylococcus epidermidis is selected from at least a part of any sequence of SEQ ID No: 897-1079, or a complementary sequence thereof;
a pathogen specific nucleic acid fragment corresponding to Staphylococcus capitis is selected from at least a part of any sequence of SEQ ID No: 1080-1169, or a complementary sequence thereof;
a pathogen specific nucleic acid fragment corresponding to Enterococcus faecalis is selected from at least a part of any sequence of SEQ ID No: 1170-1279, or a complementary sequence thereof;
a pathogen specific nucleic acid fragment corresponding to Enterococcus faecium is selected from at least a part of any sequence of SEQ ID No: 1280-1405, or a complementary sequence thereof;
a pathogen specific nucleic acid fragment corresponding to Stenotrophomonas maltophilia is selected from at least a part of any sequence of SEQ ID No: 1406-1550, or a complementary sequence thereof;
a pathogen specific nucleic acid fragment corresponding to Mycobacterium tuberculosis, Mycobacterium africanum, or Mycobacterium bovis is selected from at least a part of any sequence of SEQ ID No: 1551-1590, or a complementary sequence thereof,
wherein the presence or content of the pathogen specific nucleic acid fragment reflects the presence or content of the pathogen corresponding to the pathogen-specific nucleic acid fragment in the sample, respectively.

2: The method according to claim 1, wherein step (2) further comprises performing extraction of nucleic acid from the sample prior to the detection.

3: The method according to claim 1, wherein step (2) comprises performing an amplification reaction using the pathogen specific nucleic acid fragment in the sample as a template, and determining the presence or content of the pathogen-specific nucleic acid fragment by detecting presence or content of amplified product.

4: The method according to claim 1, wherein the amplification reaction is Polymerase Chain Reaction (PCR).

5: The method according to claim 1, wherein in the PCR:
primers used for amplification of pathogen specific nucleic acid fragment of Acinetobacter baumannii comprise sequences as set forth in SEQ ID No: 1 and SEQ ID No: 2;
primers used for amplification of pathogen specific nucleic acid fragment of Klebsiella pneumoniae comprise sequences as set forth in SEQ ID No: 4 and SEQ ID No: 5;
primers used for amplification of pathogen specific nucleic acid fragment of Staphylococcus aureus comprise sequences as set forth in SEQ ID No: 7 and SEQ ID No: 8;
primers used for amplification of pathogen specific nucleic acid fragment of Escherichia coli comprise sequences as set forth in SEQ ID No: 10 and SEQ ID No: 11;
primers used for amplification of pathogen specific nucleic acid fragment of Pseudomonas aeruginosa comprise sequences as set forth in SEQ ID No: 13 and SEQ ID No: 14;
primers used for amplification of pathogen specific nucleic acid fragment of Stenotrophomonas maltophilia comprise sequences as set forth in SEQ ID No: 16 and SEQ ID No: 17;
primers used for amplification of pathogen specific nucleic acid fragment of Staphylococcus epidermidis comprise sequences as set forth in SEQ ID No: 19 and SEQ ID No: 20;
primers used for amplification of pathogen specific nucleic acid fragment of Enterococcus faecium comprise sequences as set forth in SEQ ID No: 22 and SEQ ID No: 23;
primers used for amplification of pathogen specific nucleic acid fragment of Staphylococcus capitis comprise sequences as set forth in SEQ ID No: 25 and SEQ ID No: 26;
primers used for amplification of pathogen specific nucleic acid fragment of Enterococcus faecalis comprise sequences as set forth in SEQ ID No: 28 and SEQ ID No: 29;
primers used for amplification of pathogen specific nucleic acid fragment of Mycobacterium tuberculosis, Mycobacterium africanum, or Mycobacterium bovis comprise sequences as set forth in SEQ ID No: 31 and SEQ ID No: 32.

6: The method according to claim 1, wherein the detection of amplification product is performed utilizing trans cleavage activity of a nuclease of CRISPR/Cas family.

7: The method according to claim 1, wherein the nuclease of CRISPR/Cas family is Cas12.

8: The method according to claim 1, wherein the nuclease of CRISPR/Cas family is lbCas12.

9: The method according to claim 1, wherein:
primers used for amplification of pathogen specific nucleic acid fragment of Acinetobacter baumannii comprise sequences as set forth in SEQ ID No: 1 and SEQ ID No: 2, and a target sequence of crRNA used in combination with the nuclease of CRISPR/Cas family comprises a sequence as set forth in SEQ ID No: 3;
primers used for amplification of pathogen specific nucleic acid fragment of Klebsiella pneumoniae comprise sequences as set forth in SEQ ID No: 4 and SEQ ID No: 5, and a target sequence of crRNA used in combination with the nuclease of CRISPR/Cas family comprises a sequence as set forth in SEQ ID No: 6;
primers used for amplification of pathogen specific nucleic acid fragment of Staphylococcus aureus comprise sequences as set forth in SEQ ID No: 7 and SEQ ID No: 8, and a target sequence of crRNA used in combination with the nuclease of CRISPR/Cas family comprises a sequence as set forth in SEQ ID No: 9;
primers used for amplification of pathogen specific nucleic acid fragment of Escherichia coli comprise sequences as set forth in SEQ ID No: 10 and SEQ ID No: 11, and a target sequence of crRNA used in combination with the nuclease of CRISPR/Cas family comprises a sequence as set forth in SEQ ID No: 12;
primers used for amplification of pathogen specific nucleic acid fragment of Pseudomonas aeruginosa comprise sequences as set forth in SEQ ID No: 13 and SEQ ID No: 14, and a target sequence of crRNA used in combination with the nuclease of CRISPR/Cas family comprises a sequence as set forth in SEQ ID No: 15;
primers used for amplification of pathogen specific nucleic acid fragment of Stenotrophomonas maltophilia comprise sequences as set forth in SEQ ID No: 16 and SEQ ID No: 17, and a target sequence of crRNA used in combination with the nuclease of CRISPR/Cas family comprises a sequence as set forth in SEQ ID No: 18;
primers used for amplification of pathogen specific nucleic acid fragment of Staphylococcus epidermidis comprise sequences as set forth in SEQ ID No: 19 and SEQ ID No: 20, and a target sequence of crRNA used in combination with the nuclease of CRISPR/Cas family comprises a sequence as set forth in SEQ ID No: 21;
primers used for amplification of pathogen specific nucleic acid fragment of Enterococcus faecium comprise sequences as set forth in SEQ ID No: 22 and SEQ ID No: 23, and a target sequence of crRNA used in combination with the nuclease of CRISPR/Cas family comprises a sequence as set forth in SEQ ID No: 24;
primers used for amplification of pathogen specific nucleic acid fragment of Staphylococcus capitis comprise sequences as set forth in SEQ ID No: 25 and SEQ ID No: 26, and a target sequence of crRNA used in combination with the nuclease of CRISPR/Cas family comprises a sequence as set forth in SEQ ID No: 27;
primers used for amplification of pathogen specific nucleic acid fragment of Enterococcus faecalis comprise sequences as set forth in SEQ ID No: 28 and SEQ ID No: 29, and a target sequence of crRNA used in combination with the nuclease of CRISPR/Cas family comprises a sequence as set forth in SEQ ID No: 30;
primers used for amplification of pathogen specific nucleic acid fragment of Mycobacterium tuberculosis, Mycobacterium africanum, or Mycobacterium bovis comprise sequences as set forth in SEQ ID No: 31 and SEQ ID No: 32, and a target sequence of crRNA used in combination with the nuclease of CRISPR/Cas family comprises a sequence as set forth in SEQ ID No: 33.

10: The method according to claim 1, wherein the sample is sputum or alveolar lavage fluid from a patient with severe pneumonia.

11: The method according to claim 1, wherein identification is performed in step 2) for a plurality of pathogens, including Acinetobacter baumannii, Escherichia coli, Klebsiella pneumoniae, Staphylococcus aureus, Pseudomonas aeruginosa, Staphylococcus epidermidis, Staphylococcus capitis, Enterococcus faecalis, Enterococcus faecium, and Stenotrophomonas maltophilia.

12: The method according to claim 1, wherein the plurality of pathogens further comprise Mycobacterium tuberculosis, Mycobacterium africanum, or d Mycobacterium bovis.

13: An isolated nucleic acid molecule comprising at least a part of any sequence of SEQ ID No: 34-1590, or a complementary sequence thereof.

14: The nucleic acid molecule according to claim 13, having a length of not less than 60 nucleotides.

15: A kit for detection of pathogen in a sample, comprising:
1) primers for amplification of a pathogen specific nucleic acid fragments in the sample to generate amplification product; and
2) a nuclease of CRISPR/Cas family with trans cleavage activity, a crRNA using at least a part of sequence of the amplification product as target sequence, and a single-stranded DNA reporter molecule with a fluorescent group and a quencher group at the 5′ and 3′ ends, respectively, wherein
a pathogen specific nucleic acid fragment corresponding to Acinetobacter baumannii is selected from at least a part of any sequence of SEQ ID No: 34-49, or a complementary sequence thereof;
a pathogen specific nucleic acid fragment corresponding to Escherichia col is selected from at least a part of any sequence of SEQ ID No: 50-221, or a complementary sequence thereof;
a pathogen specific nucleic acid fragment corresponding to Klebsiella pneumoniae is selected from at least a part of any sequence of SEQ ID No: 222-542, or a complementary sequence thereof;
a pathogen specific nucleic acid fragment corresponding to Staphylococcus aureus is selected from at least a part of any sequence of SEQ ID No: 543-601, or a complementary sequence thereof;
a pathogen specific nucleic acid fragment corresponding to Pseudomonas aeruginosa is selected from at least a part of any sequence of SEQ ID No: 602-896, or a complementary sequence thereof;
a pathogen specific nucleic acid fragment corresponding to Staphylococcus epidermidis is selected from at least a part of any sequence of SEQ ID No: 897-1079, or a complementary sequence thereof;
a pathogen specific nucleic acid fragment corresponding to Staphylococcus capitis is selected from at least a part of any sequence of SEQ ID No: 1080-1169, or a complementary sequence thereof;
a pathogen specific nucleic acid fragment corresponding to Enterococcus faecalis is selected from at least a part of any sequence of SEQ ID No: 1170-1279, or a complementary sequence thereof;
a pathogen specific nucleic acid fragment corresponding to Enterococcus faecium is selected from at least a part of any sequence of SEQ ID No: 1280-1405, or a complementary sequence thereof;
a pathogen specific nucleic acid fragment corresponding to Stenotrophomonas maltophilia is selected from at least a part of any sequence of SEQ ID No: 1406-1550, or a complementary sequence thereof; and
a pathogen specific nucleic acid fragment corresponding to Mycobacterium tuberculosis, Mycobacterium africanum, or Mycobacterium bovis is selected from at least a part of any sequence of SEQ ID No: 1551-1590, or a complementary sequence thereof.

16: The kit according to claim 15, further comprising an isolated nucleic acid molecule comprising at least a part of any sequence of SEQ ID No: 34-1590, or a complementary sequence thereof as a positive control.

17: The kit according to claim 15, wherein the nuclease of CRISPR/Cas family is lbCas12.

18: The kit according to claim 15, wherein:
the primers used for amplification of pathogen specific nucleic acid fragment of Acinetobacter baumannii comprise sequences as set forth in SEQ ID No: 1 and SEQ ID No: 2;
the primers used for amplification of pathogen specific nucleic acid fragment of Klebsiella pneumoniae comprise sequences as set forth in SEQ ID No: 4 and SEQ ID No: 5;
the primers used for amplification of pathogen specific nucleic acid fragment of Staphylococcus aureus comprise sequences as set forth in SEQ ID No: 7 and SEQ ID No: 8;
the primers used for amplification of pathogen specific nucleic acid fragment of Escherichia coli comprise sequences as set forth in SEQ ID No: 10 and SEQ ID No: 11;
the primers used for amplification of pathogen specific nucleic acid fragment of Pseudomonas aeruginosa comprise sequences as set forth in SEQ ID No: 13 and SEQ ID No: 14;
the primers used for amplification of pathogen specific nucleic acid fragment of Stenotrophomonas maltophilia comprise sequences as set forth in SEQ ID No: 16 and SEQ ID No: 17;
the primers used for amplification of pathogen specific nucleic acid fragment of Staphylococcus epidermidis comprise sequences as set forth in SEQ ID No: 19 and SEQ ID No: 20;
the primers used for amplification of pathogen specific nucleic acid fragment of Enterococcus faecium comprise sequences as set forth in SEQ ID No: 22 and SEQ ID No: 23;
the primers used for amplification of pathogen specific nucleic acid fragment of Staphylococcus capitis comprise sequences as set forth in SEQ ID No: 25 and SEQ ID No: 26;
the primers used for amplification of pathogen specific nucleic acid fragment of Enterococcus faecalis comprise sequences as set forth in SEQ ID No: 28 and SEQ ID No: 29;
the primers used for amplification of pathogen specific nucleic acid fragment of Mycobacterium tuberculosis, Mycobacterium africanum, or Mycobacterium bovis comprise sequences as set forth in SEQ ID No: 31 and SEQ ID No: 32.

19: The kit according to claim 15, wherein:
the primers used for amplification of pathogen specific nucleic acid fragment of Acinetobacter baumannii comprise sequences as set forth in SEQ ID No: 1 and SEQ ID No: 2, and a target sequence of the crRNA comprises a sequence as set forth in SEQ ID No: 3;
the primers used for amplification of pathogen specific nucleic acid fragment of Klebsiella pneumoniae comprise sequences as set forth in SEQ ID No: 4 and SEQ ID No: 5, and a target sequence of the crRNA comprises a sequence as set forth in SEQ ID No: 6;
the primers used for amplification of pathogen specific nucleic acid fragment of Staphylococcus aureus comprise sequences as set forth in SEQ ID No: 7 and SEQ ID No: 8, and a target sequence of the crRNA comprises a sequence as set forth in SEQ ID No: 9;
the primers used for amplification of pathogen specific nucleic acid fragment of Escherichia coli comprise sequences as set forth in SEQ ID No: 10 and SEQ ID No: 11, and a target sequence of the crRNA comprises a sequence as set forth in SEQ ID No: 12;
the primers used for amplification of pathogen specific nucleic acid fragment of Pseudomonas aeruginosa comprise sequences as set forth in SEQ ID No: 13 and SEQ ID No: 14, and a target sequence of the crRNA comprises a sequence as set forth in SEQ ID No: 15;
the primers used for amplification of pathogen specific nucleic acid fragment of Stenotrophomonas maltophilia comprise sequences as set forth in SEQ ID No: 16 and SEQ ID No: 17, and a target sequence of the crRNA comprises a sequence as set forth in SEQ ID No: 18;
the primers used for amplification of pathogen specific nucleic acid fragment of Staphylococcus epidermidis comprise sequences as set forth in SEQ ID No: 19 and SEQ ID No: 20, and a target sequence of the crRNA comprises a sequence as set forth in SEQ ID No: 21;
the primers used for amplification of pathogen specific nucleic acid fragment of Enterococcus faecium comprise sequences as set forth in SEQ ID No: 22 and SEQ ID No: 23, and a target sequence of the crRNA comprises a sequence as set forth in SEQ ID No: 24;
the primers used for amplification of pathogen specific nucleic acid fragment of Staphylococcus capitis comprise sequences as set forth in SEQ ID No: 25 and SEQ ID No: 26, and a target sequence of the crRNA comprises a sequence as set forth in SEQ ID No: 27;
the primers used for amplification of pathogen specific nucleic acid fragment of Enterococcus faecalis comprise sequences as set forth in SEQ ID No: 28 and SEQ ID No: 29, and a target sequence of the crRNA comprises a sequence as set forth in SEQ ID No: 30;
the primers used for amplification of pathogen specific nucleic acid fragment of Mycobacterium tuberculosis, Mycobacterium africanum, or Mycobacterium bovis comprise sequences as set forth in SEQ ID No: 31 and SEQ ID No: 32, and a target sequence of the crRNA comprises a sequence as set forth in SEQ ID No: 33.

20: The kit according to claim 15, wherein the sample is sputum or alveolar lavage fluid from a patient with severe pneumonia.

21-22. (canceled)

The application's sequence listing, which the Patent Office published only in electronic form, follows.

SEQUENCE LISTING (1591 sequences)

SEQ ID NO: 1 - DNA, 20 bp, Artificial Sequence
  Primer
cacagcgtttaacccatgcc

SEQ ID NO: 2 - DNA, 20 bp, Artificial Sequence
  Primer
tatcgccacctgcacagaag

SEQ ID NO: 3 - DNA, 20 bp, Acinetobacter baumannii
  crRNA target sequence
gtaaagaagaattacttgaa

SEQ ID NO: 4 - DNA, 20 bp, Artificial Sequence
  Primer
catgggcatatcgacggtca

SEQ ID NO: 5 - DNA, 20 bp, Artificial Sequence
  Primer
cctgcaacataggccagtga

SEQ ID NO: 6 - DNA, 20 bp, Klebsiella pneumoniae
  crRNA target sequence
actgcggtaatcgccatctt

SEQ ID NO: 7 - DNA, 20 bp, Artificial Sequence
  Primer
aggtgcagtagacgcatagc

SEQ ID NO: 8 - DNA, 20 bp, Artificial Sequence
  Primer
cattcgctgcgccaatacaa

SEQ ID NO: 9 - DNA, 20 bp, Staphylococcus aureus
  crRNA target sequence
acaacgtgaacttgctgagg

SEQ ID NO: 10 - DNA, 20 bp, Artificial Sequence
  Primer
gttcctgactatctggcggg

SEQ ID NO: 11 - DNA, 20 bp, Artificial Sequence
  Primer
gcttcctgactccagacacc

SEQ ID NO: 12 - DNA, 20 bp, Escherichia coli
  crRNA target sequence
acggtcgctatgatggcaag

SEQ ID NO: 13 - DNA, 20 bp, Artificial Sequence
  Primer
tctctctatcacgccggtca

SEQ ID NO: 14 - DNA, 20 bp, Artificial Sequence
  Primer
tcgcatcgaggtattccagc

SEQ ID NO: 15 - DNA, 20 bp, Pseudomonas aeruginosa
  crRNA target sequence
ttgtaaacacacatgaggag

SEQ ID NO: 16 - DNA, 20 bp, Artificial Sequence
  Primer
cgcctcccgtttacagatta

SEQ ID NO: 17 - DNA, 19 bp, Artificial Sequence
  Primer
tcggctccaccacatacac

SEQ ID NO: 18 - DNA, 20 bp, Stenotrophomonas maltophilia
  crRNA target sequence
gcatgacacctgcgaccagg

SEQ ID NO: 19 - DNA, 20 bp, Artificial Sequence
  Primer
cacgcatggcactaggtaca

SEQ ID NO: 20 - DNA, 23 bp, Artificial Sequence
  Primer
cgaaaaagagttgtccttgttga

SEQ ID NO: 21 - DNA, 20 bp, Staphylococcus epidermidis
  crRNA target sequence
taatattcatcaattagaga

SEQ ID NO: 22 - DNA, 20 bp, Artificial Sequence
  Primer
atcggaaatcggtgtggctt

SEQ ID NO: 23 - DNA, 20 bp, Artificial Sequence
  Primer
tcaaatgcatccctgtgcct

SEQ ID NO: 24 - DNA, 20 bp, Enterococcus faecium
  crRNA target sequence
actacctgaacttatataca

SEQ ID NO: 25 - DNA, 20 bp, Artificial Sequence
  Primer
ggttcagtcatccccacgtt

SEQ ID NO: 26 - DNA, 20 bp, Artificial Sequence
  Primer
cagctgcgacaactgcttac

SEQ ID NO: 27 - DNA, 20 bp, Staphylococcus capitis
  crRNA target sequence
aatcaccttattaatcaata

SEQ ID NO: 28 - DNA, 20 bp, Artificial Sequence
  Primer
cggcaagtttggaagcagac

SEQ ID NO: 29 - DNA, 20 bp, Artificial Sequence
  Primer
cagcgcctagtccttgtgat

SEQ ID NO: 30 - DNA, 20 bp, Enterococcus faecalis
  crRNA target sequence
gcaccaaataacacagctga

SEQ ID NO: 31 - DNA, 20 bp, Artificial Sequence
  Primer
cttcaaactgtgcgttgagg

SEQ ID NO: 32 - DNA, 20 bp, Artificial Sequence
  Primer
gagatcggcttccctgtacg

SEQ ID NO: 33 - DNA, 20 bp, Mycobacterium tuberculosis
  crRNA target sequence
acgcagctccgatcagtcgg

SEQ ID NO: 34 - DNA, 3079 bp, Acinetobacter baumannii
  marker
agaagaatataaagttgactgtgtttatgagccagtaagtgtaaatacggtacgctggattcattgtgatgatgaaaagattcttaatgagtttaagaaaaaggcacatgaccaactttctattgatggtggcggacacttaacgtatcttgcgccaagccgagtgaacttgcagattatgcaagagcgttggcctgatattgagttccgtagcacacgtgaacactaatcatgtaaatgtgacaaacagcttcgaatagaagctgttttgttttgaaaaataagaaaggatgatgaaatgaacttgagtaaaaagacaattattgcgcttgtggttgcagccatagctctaattttggctatttgtgtatttgtctggaaaaagcctcagtcttcatcatcttctcaagaaaattcagcttctactcaagaccatccggttgagaaagcagaggttttaccttatttaaatttgaccgaaaccaaagcaagttatgcagtgccgttttgtgaaaagaaaaattgtattgatgtcgatattcaaaccataaaaacccaaagatgcgtggttaaatagctggattagaaaaaaatcaggcgaaagttattcaagctcaaattaatttgaaaaaagatttaagccttcaacaagcgattaatgcttacgtgaaaaagtcggatgaatggcaagataaatattctaaaaatcgtgcttatgaattacacattcgtacacgcattgcctcgcagcgtaaccagtatgtgttattgcaattggctttagacagtaaacaagaagagatcaccataaaagaccgttattattttttcgtggctgatcgtaaacttcataaaaacttaacgttgcttgatgtgcttaaaaaagaccagcaaccgacagtacatcaaattgttcaaactgcgtaccaggactggttgaaaaagcaaactgccgatgtcaacaaacaggccccaaaaactttatattggggacaagctgactggttctttgatggtgaaggggtaggtttgcactatcaggcaaatcagattacgaaagatgcgcctcaacttgatatttatttaacaacagaacaaacgaaaaaaatattgcaacctcaggtttatgaacaaatgttttaagttggtagcagaatttgcaacctacttgtagatgcgctaacttcatatgagttatgcataatcttctcagaataaaggcaaaatatgatgttaacttctaaggcttcgctacgtttaacgctacttgcttctgcgatatttttggtggcatgtcagcctaaaagtgatcctaaagagtcggaagatcagcaaaaaccggctgtggttgaacaaaagcctgtagaactgactttgaaaggggaaacagttccaagtaaagtgactttaccggattgtgatggtaaaacttgccctgaatttacggtagaacgcctacaaagtaatttcccttttattgataagattattgatcaacaagttttaaaagcactcggacagattcttgaaattgcagaaccagatgcaaaagcagcacaagctgataagaagacagaagcttcagtagctgccgctacagagcaacaagatagtttcgatgctcaggttcagcgctatgcaaattcatttattgatttggacaatgaattaaaggctctaagtagtaatcaccagattaatctgttggtgaaacctaaaatcatacagtctcaaggtaaagtcgtaactgttgttgtaaatagtagtagctatttaggcggggcacatggctcggcagcgcagcaatattataattttgatttaaagaaagaaaagcaggtcaagcttgaagacttgttacgtccagagaaaaaagcggctttagaaaaattagcacatgaagcgtttaaagcttgggtgacagactcaaaacttgcaaatagtgtgagtgaatatgagcaagcttggccgtttaaactcacagaaaatttcctattaggtgaccaaggcttgattcttcaatatggcgaatatgaaattggaccttatgtggtcgggctacctcgtttagtcattccatatgaccaattacaagaagtattgaaagaagaatatttgccgcagcctaaagctaaaccagcttcgacacctgccgcaaaaagtgccagctaatgcatctgtttgatactcatacccattttgatgttgccgattttgatgaagatcggcaccagttagcacttgaagctaaaaaagtgggtgtggatgctctggtgttaataggctttttacagtcacgttttgatgatttggtacaaacccatcatcagctcaagcagtgggacaacgtgcctacttcttatttagcaccggggttgcatccgttttatattgagcagcacaaaccagagcatctttctcatcttgaacagattttgcagcaagaagactgcgtcgcaataggagaaatcggcttagataccttcttaaaggaacacaagcagcccgatatatatgccaagcaaaaacagtattttggtgatcagttagatctggcaactcaataccaaaaaccggtgttgcttcatatacgaaaagcacatggtgatgtgctcgcactattaaaagcgcataagtttaaactcggtggcattgctcatgcctttagtggcggagtagaggaggcaaaaggcctgattaagcttggttttaaaattggtgtgacgggacaaatcacgaaccccaatgcgaaaaagcttcatacggttgtgcaggctataggtgccgagcatttagtgattgaaacagactgtcctgatatgacgccactttgctgccaaacttcaactgagcagcgtactcgaaatacgcctgtgaatttaccttatgtactaaaaagtttggctgaaaatttaaatatggcagagtcagaattagcagatttgctgtggaaaaactctttatctgctttgaaattaatcgtaataaaaatcaaagattagaaatagtaactaaaacaaaacacagcgattaaaaaagaagcttaaagtaagaaaacaacatgtaaaaacgtgaaaaa

SEQ ID NO: 35 - DNA, 1732 bp, Acinetobacter baumannii
  marker
tgaagatagccatgaagttggcggtgtaaatacaaccattagtttacgttaaaggggatcacggatgaatatcgcctttatcggtctaggtaatatgggcggcagaatggcccaaaacctactaaaagccggactcaaagtttatggttacgacctcagtgaagttgctattcagcacttcgccgaggcaggtggtgtggtctgcgacagcccacagaatgcagctaaacaagcagatgtagtcattaccatgttgcctgcggcgaagcatgttaaagaggtttacttgggcgaaaatggtgtcttggaagtgctaaaagcaggtagcttatgcattgatagcagcaccattgacccgcaaaccattaaagacattgctgctgttgcacagagtaaaaatattaaaatttgtgatgcaccagtttctggtggaaccattggtgctcaagcaggaaccttaaccttcatggtcggtgccgatgagcaaacctttaatgaggtgaaacctgtgctcagccacatgggcaaaaatattgttcattgtggtgatgtgggtgcaggtcaaattgccaaaatttgcaataacctgattttaggaatttcaatggctgcggtggccgaaggcatggcactcggtgtgaagctaggcatcgacccacaagcattggcaggtgtaattaatacttcaagtggccgttgctggagttcggatgtgtgtaacccatggccacatattaatgaaaatgcgcccgcatctcgaggctatcaagacggttttgcgacacagctaatgctaaaagatttaggactcgctgtagaagccgcaggccaagtgaaacagccggttttattaggtggcatggtacaacagctttatcagcaaatgtgtatgcgtggtaatgctcatctcgatttctcgagcattattcagcaatacctgccacaagaggcataacggtaaagccaaaggatggctttaaacgaataaatcaaaccctgtcgtgaataacaacaaatccggactgagggaaaagatatgatggattatcaaaatgctgtacaggctttcgatttggaaagcactgctaaacagatgttgtcaggttcactcgatgcactgaacgcatgttatgaatgttgtgatagacatgcagatggcgacaagatcgcgctgtactggcaaggaaaagacggtcgcaaagaacaatataccttccgtgaactaaaagaatggtcgagtcagtttgctaactttttaaaatcacaaggtgtgaaagcgggagaccgtatttcaggcttattgccaagaacacctgaactgatcgtgaccattttggcggcttggcgaattggtgcggtgtaccaacccctatttactgcctttggtcccaaagcgattgagcaccgtattcaacttgctcaaagtaagctagtggtgaccgatatgggcaaccgtagcaagctcgacgaaattgaaaagtgccctgcaattatgacagtggccgacgcacaaggtactccgcttaaagcaggtgattttaatttctggaatgaagtgaagcagcagtccgatcaatgtgatctggtgatgcgtaacatccaagatcctttcttgcttatgtttacgtctggcactacaggaccagcgaaaccattggaagtgccactaaaagcactgattgcttttggtcgctatatgcaagatgccattggtttaaccgaagaggattca

SEQ ID NO: 36 - DNA, 1712 bp, Acinetobacter baumannii
  marker
gctgatttggcatttcctgatatttatttagatgacttttttcatcttgcagaccgtattgcacagcgccgtaaacctttaattgctgcggtgagtggctatgcattgggtggtggctgtgaattagcactcatgtgtgactttatttattgtgctgacaacgccaagtttggtttacccgaagtcactttaggggtaattccgggtattggtgggacacagcgtttaacccatgccattggtaaagctaaagcaatggaaatgtgccttaccgctcgtcaaatgggtgcagtagaggcagaacaaagtggtttggttgcacgtgtgtttagtaaagaagaattacttgaacaaaccttgcaagccgctgaaaaaatcgcagcacggtctttaactgcaaacatgatgctcaaagaaaccattaatcgagcttttgaggtgaatctcaccgaaggtttacgttttgaacgccgcatgttccactccatttttgcaactgcggaccaaaaagaaggcatgcaggcatttgttgaaaaacggcaggcaaattttaaaaatcagtaagagatcaataaaatgaatacagaaaatcacttaatgattgagcgacaaggtaagcttggcgtgatcaccttagatcgtgtgactcatctcaatgcattgtcgctagatatgattgaaggaattggcgcccaattggagttgtggcgaaatgatgctgctgttcaggcgatcttaatcaaatcaaatagcccaaaagccttctgtgcaggtggcgatattcgctatctctacgacagttataaaaatggcacagccgattacaaaggctactttagtgcagaatataaaatgctcaatacactgcgcgaatatgaaaagccaatcatcgttgtgcttgatggctatgtattaggcggtggttttggcttggctcaggcgtgtcacattgtggtaagcagtgaaaagtccagatttgccatgcctgaaacagcgattggttttttcccggacgttggcgcaactcatttcctgtctcgccttgatgatattggcgtttatatggcaattacgggtgagcagatcagcagtagcgatgcgctctatctcgacttaattgactaccatgtgccaagcgatcagttacaagctttgcaagacgctctcgttgaagcgccaagtttaagcaaagagggaattgaacacatcattacccgatttattactcgtcctgctgaaagtgagctcaaacagttggcagaaggtatccgtaaacacttcggatatcagcatttagatgagatcgaacaaagccttgaaaatgaacaagatgaaagcttaaagacttgggcgagtaaaatgcttagtattttgcagcagcgttcatttattgccaaacaaaccagcttgaaactgcaacatttaggccgtggactttcactacagcagtgtatgcagcttgagcgtgatttacaggatatctggtttgagcatggtgactttattgagggcgttcgtgcgctcattgttgataaagataaacaaccacggtggcaagaacgtaatcctgagctggaacaaattttagaaaaactaagctaaaccatttttcaaacacataaaaagcttaaggagatcaagcgagacctgaacatgcttatggtcaggacagatcataagcataaaaaagacaaaacaagaaaatctaaaaa

SEQ ID NO: 37 - DNA, 1606 bp, Acinetobacter baumannii
  marker
actacttgaacacgacgctgtgattgaagccgcagtaataggcgtgcctgatccggatcgcactgaagtggttaaggcttttgtaattttagctgcgggcgtacaaccttcagatgcgcttgctgaagaactcagccagtttgttaaaagacgactttctgctcatgcttacccacgattagttgaatttgtgagtgaattacctaaaactccaagtggcaaaattcagcgctttttattgcgtaatcaagaaattgctaaacaacaagctaaagcagggtaaaggaaataataatgcaatttaccgaagaacaattactcattcgtgatatggcgaaaagtttcgcccaagaacaaatcaagcctaatgccagtgattgggatcgagatggaacttttccaaaagaaactctgactcaaatgggacaactcggttttatgggaatgcttgtttcagaggaatggggtggttcagacacgggtaacttagcctatgtactggcactcgaggaagttgcagcagcggatggtgcaacctcgaccattatgagtgtacataactcggttggttgtgtgcctattttaaaatttgggactgacgagcaaaaagagcgctttttaaaacctttggcacaaggtgaaatgataggagcttttgccttaaccgaaccgcatactggctcagatgcagcagccatcaagacccgtgcggtaaaagatggtgacgattacattttaaatggtgccaagcagtttattacctcgggtaataatgctggcgtcattatcgtatttgctgtgaccgatccgagcgcaggaaaaaaggggattagtgcatttttagtcccacgcgagacaccgggttatgaagtgattcgcgttgaagaaaaactgggtctgcatgcttcagatacgtgtcagattgctctgacagatgtacgcatccataaaagtctcatgctgggtaaagaaggtgaaggcctgaaaattgctctcgccaatttagaaggtggacgtattggtattgctgcacaagcagtcggtctagcacgtgcggcgctcgaagaagcaactcgttatgccaaagagcgtattacttttggaaaaccaatttttgagcatcaaaccatcgcatttcgtcttgctagcatggcaaccgaaattgaagcagcgagacaactggttcactacgctgcacgtctcaaagaagcaggccaaccgtgtctcaacgaagcctcaatggccaagttatttgcttcagaaatgacggaacgtgtgtgctcaagtgccttacaagtgtttggtggctatggttatctcagagacttcccaattgaacgtatttaccgtgatgcgcgtatttgtcaaatttacgaaggcacaagtgatatccaacgtttagtgattgcacgtagtctataaaatcagaacaaggaataaataatgcagtggcaaagtattttattagaaaagcgtaatggggttggattgattacattaaatcgccctcaagcgctcaatgccttaaatagtgaattaattagtgaaattaatcaggcattagatcaactcgaaaaagaccgcgaaattggctgcatcgtattag

SEQ ID NO: 38 - DNA, 1193 bp, Acinetobacter baumannii
  marker
actcatgtgcattgacattaaatgaattctgtacaaaaaaaactggcgagtccttatctaataacatcaagtagtctctaaaagtaattaaccccgggttctccattgccccagcagcaaagtctggtgctgcaagtaagtcgagcttgtcaaatggataaccaaaggcaaaataatcttctaaagtttttaaaatggctggcgtttcagataaggcttgctgcattttttcagctttagtatcaggtgcaataccacgtaactggatcggctgcttacgccatgaagttgctccaatatcaggccctttttgtaattgccacggtccgacagccaatgcaagtaaatatgttggtagtggtttggtttgtgcaaaactgagtgttttccaccctgacttctctatttgctcagatgtttgttgggtattggcaaaacctgaatatttgcttggaatcgtcaaacgaatattaaacggcgttttaaaacgtggttcatcaaatgatgggaatgactggcgtgcactaattgcttccatttgcgtcatcacataaggtttaccctcaaactcgattttataaataccatcgagctgctggtcatacgctgcattaaaatctagaacgagttgatactgtcctgcgggcaaggttttggcaaatttaattttactcaccccatctatttcagaggcttgctcatattttgccttggttttgacgccctctgccgatgtaatattcacatctttaaccgttaaagatttaccatgaatccagatgtgatctgtggcttgagccagctttaaatgaatcgtagttttaccggtatagcctttttgtgcgggatcaatcttaaaatctaaatcataagattcgggtacgacccactcgggtaatttaccaatcgggatttgttcactgttattcgatgcaaaaatctgtgttgccgataaagataataatgttgtaagtaacaatctttttttaaatgaaggcttgaccagcataaggggttttatcctctgtagttttaaataaaaagatgcagcaaatgctgtaccacttcactgcatccatacatcattcttagaatttatagttaaactccaaccaaccttgacggccgaatggtgaatatgatcctatcggataatacggccaaccgcctgtgtcatctcgtttcactttgtc

SEQ ID NO: 39 - DNA, 1072 bp, Acinetobacter baumannii
  marker
gtagacaaagcgggtattattcacgctgcgattggtcaagttggctttgatgctgctgcaatccgtcaaaacgttgaaactttagttgctgacttgaaaaagttaaaacctgcaacttctaaaggtgtatacatcaagaagatcactttgagctcaactatgggtcctggtcttactgttgatgtaaacaacgtttctaactaagttttaacttggttaagtaaagaattttaaagtcctgatgaggattaagcataaaacagaaaagttatttctgcttttgcttcggtagagtaaagctttatctattacttatcaggcggactttgaattgataaatgagaatttatcagcgtcaaagacctcaggcgaaaagacgttattttcgaatagcgattttcttaataaaccagcctgcgtagacgcggtggtgtgatttgttcctcctccgcgtgtaagtcgaaagacttacgaactgggagtgtgcccatcgggtacataaatcaccttaggaggttttacaatggctcttcttattgaagacaaaaaacagatcgttgcagaagtaagtgaagttgcttctaaagcgtttgcagccgttgttgctgactatcaaggtttaagcgtagagcaattaacaacacttcgtgttgaagctcgtaagttaggtgtaactacacgtattgtacgtaacactttggctaaacgcgcatttcaaggtactcagtttgatatcttgaacgacaaccttgttggtccaacaattctaggtttttcaacttctgaagatgacatgggtgcagctgcacgcttgttcgaagaatttgctaaaactaacaaagcatttgaattaaaagctgctgcatttgacggcaaagtttatcaaggtgctgatgttagcgttattgctaatcttccgaaccaagagaaagcgcttactatgcttgcctctgtccttcaagctcctatttcgaaattgggtcgcctcattacagcactcaaagagaaaaacgagtcagaagctgcttaatcaattttacacaccattcaatatccatttggagttattctc

SEQ ID NO: 40 - DNA, 760 bp, Acinetobacter baumannii
  marker
ttatcgaccatgatgttggttgagcattgcgattcaagcaggtattccggcaggtgtgctgaacgttgtgcatggcggtaaagaagtggttgaccgtttgtgtacccataaagacattaaagcaatttcatttgtaggttcaacagcggttggaacacatgtttataaccttgcagggcagcatggcaaacgtgtgcaagccatgatgggtgcaaaaaaccatgtggttgtgatgccggatgccaataaagaacaaaccttaaacgctttagtaggtgcagcattcggtgcagcgggacaacgctgtatggcattgtcggttgcagtgatggttggtgacagtaaacagtggattcaagagttagttgaaaaagccaaaactctaaaagtaaatgcaggtcatgaaccaaatactgacattggtccagtgatttcaaaacgtgccaaagcgcgtgtaattgacttgattaatagcggtgttgagcaaggtgcagagttactactcgatggtcgcaatgttcaagtacaaggttatgagtcaggtaactttgtgggtgccacgatttttagtggcgtaaataccgacatgcgtatttataaagaagaaatctttggcccggtactttcaattatttgtgtagatacactcgatgaagcgattgctttgatcaatgccaacccatttggtaacggtgtaggtctattcacacaaagcggtgccattgcacgtactttccaaaaccttattgatattggtcaa

SEQ ID NO: 41 - DNA, 677 bp, Acinetobacter baumannii
  marker
tttgaaataaaaagcttgatgctggcttagttgttcatataataagtcgcgagttctacgacgagtacaaaaatgtcgaatgataaatcgcgtgacgcattgagcgacgcgccaattcctcaaagaaataattctgctgaagttgttcgttctggttcgcctttagatatcgttctatgggtgatagcaattgcattattgctctcggctaccatggtgaatcagcatttaccagcgtattgggcccctgcaaatgatgtttgggtgcgcgttggggtaatttttgcttgtatcgttgtggctttaggtttattatacgccacccatcaaggtaaaggcttcgttcgtttgctgaaagatgcacgagtcgaattgcgtcgagtaacttggccaacaaaacaagaaacagtcacaacatcgtggcaggttctattggttgtagttgtggcatcattagttttatggtgttttgactatggtttgggttggttaattaagttgattatcgggtaaaagagctatgaaacgttggtacattattcatgcctattctggttatgaaaaacaagtgatgcgttcacttaaagaacgaatccagcgtagcgctgttgccgatagctttggtgatgtccttgttcctaaccgaagaagtggtagaaatgaaggatggtaagaag

SEQ ID NO: 42 - DNA, 568 bp, Acinetobacter baumannii
  marker
cgattactggaccgttatttttaggccatgccactttgttctatgaaggcggttttagtaccgatagcctatgccaaattgtgaaagattataaagttaacaacttggcaggtgcaccaactgcttaccgcatgatgatggcagctgacccagcacaaatggcgccgttaaaaggacaattccgtgtggtgagtagtgcaggagagccgctaaatccggaagtaattcgttggtttaaacaagtccttgatgctccaatttatgaccactacgggcaaactgaagtaggcatggtggtgtgtaatcatcatggtttaaaacatgaaattcatgctggttcagcaggttttccaagtccgggctatcgtgttgcgattgttaatgaacaaggtgaagagcttccgccagacacaccgggaattttagcagtcgacattagccagtctccaatgatgtggtttggtggctataaagaaagtcgtaaatcacctttcatcggtcattactacttaacgggtgatactgccgagctacatgccgatggcagtatgagctttgtcggccgtag

SEQ ID NO: 43 - DNA, 353 bp, Acinetobacter baumannii
  marker
gagttcgactctcctagtctccaccagaacttaagataagttcggattacagaaattagtaaataaagattgagatcttggtttattaacttctgtgatttcattatcacggtaattagtgtgatctgacgaagacacattaactcattaacagattggcaaaattgagtctgaaataaattgttcactcaagagtttaggttaagcaattaatctagatgaattgagaactagcaaattaactgaatcaagcgttttggtatgtgaatttagattgaagctgtacggtgcttaagtgcacagtgctctaaactgaaatgttgaagttactaacttgtaggtaacatcgactg

SEQ ID NO: 44 - DNA, 324 bp, Acinetobacter baumannii
  marker
gtgtttaacctttcaaaaagatgggttaaaagaagaagtattttctattattcattcttatcgtgaacttatggtgtttgataagctgagaaaaatattttatctccatgccaacctcgaagggctgtaccgtttgccttttaaggccaatttttgaaattgaaaagttttatcccactgcctacaaagtggtggtcgattatagaaactggctagtgacccaaatacatggcctacttttaaccgtcaaacccgcagccttaatagaagatgctcacatgtttctatttgcaattgatggggcaatggttcagttgttaagta

SEQ ID NO: 45 - DNA, 256 bp, Acinetobacter baumannii
  marker
aattacttgttattgacggtccattcacagactttaaaggtgtggtggaagaggttcaatacgataagtcacgtttaacgttgacgattaacgtgtttaatcgaccaactcaggttgaactcgaatttcgccaagtcgaaaaaacgatttaatcttaattggttgaaaagcgcccgattttatcgggcattgttgttgtaacagtattgttacgtagaaattggggagcctaacggcgtttgtacccagaggtatt

SEQ ID NO: 46 - DNA, 217 bp, Acinetobacter baumannii
  marker
tatgggtcgtgactttgctggtgtatacaatattcttgaagataaattgtatgtctacaaagcaggttttggttcaaccattaccgatattgaagtacgtgatggctataatcacgccgatattcgtgaaaaagttggtgagttagcttgggcttcttttgaagagtcacttgagcttgtacaaatggcaaatgagccattagatcgtgaacttttc

SEQ ID NO: 47 - DNA, 194 bp, Acinetobacter baumannii
  marker
cagttgtatatgaagcatcaatcgattcttaaatatgcaagacaacttgatttagttatacctctagctaaaatgaacagataaagtaagattcaattcagcccagtctgttacagatttggaaaacgcttcggcatcaagtaagacccaagcaagtatccataaacagttgtgctggcgaccatagcaagagt

SEQ ID NO: 48 - DNA, 153 bp, Acinetobacter baumannii
  marker
tgaatctgccaaatcctgtgcaattttttcaccacggttttttaaggcttctggcaacatcagcatcgggttaatactgctcatttcagcaaacaccggaatcggttgtggacgggctgcggccatatcacataaagctcgtccaccacgcaa

SEQ ID NO: 49 - DNA, 104 bp, Acinetobacter baumannii
  marker
gggagggaacagggggtgcacacaagactactcctcagaagaaataatcctgatgtggtcgaatcaaatcggtccgtcaaaaccgactggcaatgtaggccagc

SEQ ID NO: 50 - DNA, 2700 bp, Escherichia coli
  marker
tgtagtggaacatctctttgcccgctttaaaaaagcgtaacgtgtaaatgagagtaaggttgaacgtgaaggttcagccttactctttcctgctaaaaaaaaaccattcaccactcaacaaccagctaaccgtcaggaataccaggcttagtacacagcactgaaagtagaaaccactccagccattcgtcatcaatttgaacagcacaatactgacccacattcccgtaatcgtatgaattgtcagcttaataatcccaaacatgccgagtcttttcctcctgaaaatacctataccgcctggcaaactgcgaaagagaaactagccggtagcccggcagaaatcatcagggaagagtttcacatgaagcaggtgtgagatcctgaccaatattcaaatgcgaaatatgtcaggaaaaggtacctggcgaatgttgcgcaaactgatgtggcgttacaccataatattgtcgaaatgtgtttataaagtacgacgtactgctatagccacatttttccgcaatagtatgcagaggaatttgacgtaactcgagtaatcgtctggccatcgacatcctggaggcgagtaatattttactgaaacaggtattttcatcctgcaacttttttttgatgagactctcgctggtatacattctttccgcgatatcgcgcagataccaacgtttggcgatatcaaagctaataaggcgttcaacttttcctgaaacagtgctgatgctattgaaaagtaaggggatcagttctttcttatgagaaaacatcgataaacaggaaaggtagagcatattgctcagtatcggtgaatttaccccggattcattgaagctatcaaaaatcgccgtcaccagcggcatggggggtgactggttaattaacaaacggtctttgctatgtaaccctaaattgcgtggtagctgacgaatattttgtaagtaatggcaaactgtcagctcatcgatatccagtcgtcgcgtatccggtgaacaaaacgcaaaatcgtctgccaaatttttctccagcagcaggatactctcgttatgcagcgatattttttgctgttcatgataaatatcgaatgaacgacgaatgaggatcaccgagcagacatgagtcatgattatcccttatatttcaatactgcgattatttcaatttcagtatactaatgaaatgatgccagactgtttcttagcgcaaaaactgccagatttggtaggaccaaaatttatccacaaagtagttttgcataacagttaattgataataagtaaatgcagcacgaatatattttcgcacagcgtatagcttatgtttataaaaaaatggctgatcttatttccagtaaaagttatatttaacttactgagagcacaaagtttcccgtgccaacagggagtgttataacggtttattagtctggagacggcagactatcctcttcccggtcccctatgccgggttttttttatgtctgagtaaaactctataatcttattccttccgcagaacggtcagtgccgtaaaaattcccttgcgcaacaatacttgccgccgagtcacggttcggcaatccctgcgccgatcgctcctgatactctgtgggcgtcatcccataataatttcgaaagacgtaaatgaaatacgacacgctgtgatatccacaggatactgcaactcgcttaattgaaaaaccatgtataacaataagttgcaaagcacgttgcattctacactcagtaagcaactgtgaatatgatgtctcttcttcgcgcaattttttctttaacaggcttggactcatcaacagctcgctggcgattcgggctagtgtccactcatgggcgatattattattgataaccgtacaaactcgtgttcgcatgttcggttgcaaaacgttcagaagcagcggtataaagtgctcatcctcaagaaaaacagataacaacgcaaagattaatgctcttttacgtagcatttctgcatagcgaagattcttattctgcgatagttgcgcaacttcctgaaaaacaggaatatctctgctacagtgatgaacgagtaatgaagaaacttttttatgtgcatgaagatttaatgcctcctccttgagcatcgggagaaataatgaaagcgtgtcccttgatactaatacaaaattttcaacacacttatctactcgaatttggcttgcatccgcaaaaaccaggtcaccgccattaaaatagcgatattcaccattaaccatggtgagaatatatttatgtcttgcgtacgcaattagacaattcccatgtagtgattgcatagttgacttaatattacataaacatattactgtttattaatgtagcacgccgccctcttaagtcaaattgattgataaataaatttaaacgaagcgggagaacaggatgataatgtgtgatgttctacgggcaggatgactggatttataatacaaaaaacgtgtttaagaacgcagggaaattaatagtaagcaaataatcccttttcgtgacattaaaggtaatcgctacatttaataaacattcatataacatatatcttatcaacacgatgaatagacagccaatatattattgcgattaataagcaaccgaatgcccaagctgatttttttaaaggctgggcattcggtttttacaacgttat

SEQ ID NO: 51 - DNA, 1950 bp, Escherichia coli
  marker
aaacagcccggattgttcgacattcagcatttcgctatgggcaacaacacaacacagccagcaaatcagcgccagcagcccgtgcctcatagcggctgccaggttatgggtagccactgccaggcggcaccgggttccatctgggccagcttcatgacataacgcggttgttgagataaagcgtccagcttcggcattaataaagtttgtgcggcgttataaaaaaccggttcgagattcttcggcagactggtcaacgtttcgttacgcagcagtttcgccattccttgtggattgatatagagcggaacgatgccatcagtgggtattacatccaccattgccgggcgggttttattcagtgtttgcagggcgttattaaccagcgtgtcatcgagggagaaaagcagcgttttgttttgcatcgccagcgacacgcggaaaaaataatccgacattaattgatcgggttgcgccgcctgcgctttcggatactgaccgtatcgggaactcacttcgcgacgccagatttgcgcttcgccctgctgagtctggcttaccggcaaaacaccttctggcgctttgctttcgtgcgcaccaatattttgcgtaaacagtttccctggcaattgcgcctgttcggcagtgccatcaaactgaccgacaaacagcggggtttgcaattttgagtcttcataccagcacagccccgcggcaccgtctaacgccccattcagcttgtcgttttcctggctgatgtgcgaaagcatctcttcggcaataccgtgtgaatacggcaccgccacacagaagctggctccggcaggcatactgttccataccggcgtaaaatcgaaactggcatctacgctggcggattcatcatttaacgccacaaaactgtgccagccgtcgttacccatttcgaagcgtacgccagcaaaagaaggcattaaccgctggtagccaaaccccagcaacctggcgctgaccacgatgcgctggcgtactggcgttttttcggcagtacgctcttccaggccaaagcttgcttgccagcgttttttgccgctcaacaaatcacctgcgatcgccgtggcttcggtatcctgctgatcatctttaaacagcatatccgtgctggaaaacaccagcatcttgtcctgataagtcgcgaacatcagggcgttattgccgttatagcgcaactgataaacaggaatagtttcactatttatcttgatgctactgatttccgttttgcttaactggctgtcgctggtagcggcaaacaacaatggctccagcagtttgcttaaaccactgcgctggatcagcaccatataatgtgaaagatggccttgtttatcgtgccacagcgctgcctgcgcgggctgatctaagagtgacgaaaagagcttatctttcagcgtgagatcgtgttcatagacaatacgacgaatgctgccttcaatgcccagacgatcggcatgattctgataatagaaaacgaaatcttcgctcagaacatcgtggagaaacggaatggtgaggagatctttgggaagctggctcagagagtcgctgtcgagaaagaggtccggctcattgagatcgatttgcagattgttgtgcaccaccagcggcgacaacgttttttctggcccactgccagcatattgcaacgcccagacgccagcggaaagcagtgctattgcgccaaaacctacaagaccatagaaccgccagcctttcgcctttttttcaccactcattgccacattccttgtgtatagccagccattttttacgggcacagccaaactttaccgtgccctaatacgacaaaagcccagactttgcagcctggacttttcaattcaaacaagggagatagctcccttttggcatgaagaagtaaaattattcttcttctggctcgtcgtcaac

SEQ ID NO: 52 - DNA, 1025 bp, Escherichia coli
  marker
tctctggcggcgattgaagaagaactggtgccagcgaaagcctgttctggtctgcgtcaggtgctggaagacgtgatgctcgaccgcccggaatactggcaaagccactaccacggtgacggcaacgcgcgtcgtctggcgcgtggttatagctactcggatcgcgtgcgctattactggccggacagccagattgatgacgctttcgctcatctggtacgtaatctggcggattcaccaattccgctgccgctgatcagccagtatctgccgctgcagtacgtgaaagttcgctccggcgagctgcagccaacgccacgggaactcattatcaaccatattcaggacatcctggcgcagtaccacacagcctgtgaaggccaataagcaaaacaaagaggaacacgctatgccaaatattgttttaagccggattgatgaacgcttgattcacggtcaggtcggcgttcagtgggtcggatttgcgggggcaaatctggtgctggtagccaacgatgaggttgccgaagatccggtacaacaaaacctgatggaaatggtactggcagaagggatcgccgtacgtttctggacgctgcaaaaagttatcgacaacattcatcgcgccgccgatcgacagaaaatcctgctggtttgtaaaacacccgccgatttcctgacgctggtgaaaggtggcgttccggtgaatcgcattaacgttggcaatatgcactacgccaatggcaagcaacaaatcgccaaaacggtttctgtggatgcgggcgatatcgcagcatttaacgacctgaaagccgctggggtggaatgcttcgttcagggcgtcccgacagagcctgctgtggacctctttaaattactttgagggattcatcatggaaatcagtctgttgcaggcatttgcgttgggcattatcgcctttatcgctggcctggatatgtttaacggcttaacccatatgcaccgcccggtggtcctcggcccgttggtcgggctggtacttggc

SEQ ID NO: 53 - DNA, 874 bp, Escherichia coli
  marker
cgccgctgcagaaactggtgagtaacagaaacgccagaatactttttttcatcattttcgtaatccatcaaaaaggttcgagagtcgcaagcaggctgatgatcaccagcactaccgcacctatcgcccattcgagtttagtcatccacacaaaccagggtgccgcacgatcttcatcctgcctcatgcgcggtacaagaacataacgattagccagcgcaatgaccaccataatcatcaccaggatggctttgagcaataagagttggccccagtaagtcgtaagcgtggggggaaatccggtaatcaacaatgcattaagcacgccgcttgccagtacgccgatcaccgcaaaatgcccgcaccaggaaaaacgcatcagcgcctgaatagcctggtgtcgccaacggcctttgatgagttgcatacaccagagcaccggcagtaatcccccaaaccacgccgccgcacaaatcaggtgaatcgcgtgattagtctgatggattttcgccgttaccccttcattcagcgtcgcatgcccgactcccgccagcagaataaattgcgcggtagtgagcataaacagcaaacgtggcatattccgcggttgcataagggcgacgatcaacgttacgagggcgagaacaatttgccataaccagacgccaccaaactgcgtttgcaaaacagcctgccaaatgtttggcgaaaatacatctgtccatcccgttcccatcaacccgccctgaacggcgagcattgcagtggcactgatcaaactccagacggcagcgtgctgttgtaaacgcagaaaacgcttcgccagcaagcgacgaatcgttaagggggccagccaggcaccgtacattgcgaa

SEQ ID NO: 54 - DNA, 672 bp, Escherichia coli
  marker
acagcatcaggaagtgcattctaaacaaacagcgtaactcgttattgtttgcgatctacaatatctaaatgtactgggcaccattgcggtgcccaataagtttactcttccgtctttaaactctatttttgcgccgattctttactgtcagctttcgtttcttgttcatcgttatcgctgaaaataccatgacctgagttcaacaacattgaaacgagcatatcattattaatctcttcaccatttaaaactcgcgccagaatttcgctgccaaacagttgcggtgagagaatgatatccggatgtaccatcttaatcttattcaggtttttgctatcactgacggcgagaactgttttgacatcactgctcatatcttttgccgagagtacaacaaacgcgttatctgcatcgttatcactcagcgccagaatggcccggcaacgatcgattcccgctttctttaatactgaactgtcattactgtcaccggggataacatcagcgttatcgcctaagcgttgctcaagttgcttgatatcatcttcaggcaagttgctgataaccgttacgttttgtccgcgttgattcagttgcaggatcgtattgatggcgagaatcgaatgtccgcaaacaataaaatgatctttacgatgcattgtatgattgttt

SEQ ID NO: 55 - DNA, 662 bp, Escherichia coli
  marker
ctcgatacgtcttccactttttttgcacacttatgcaacggaatacgcgccgatatatcattgtgcttaaccttgccagttcaggcagatacttaaactggcgtaaattttctaacatagttcaataagttcagttgttccaggccagtgggagaagttattacatagtgcgtgcaatatcacattttttgctatgcaatgaataaaaagttatatcactttttctcataaaacagtcagttaacggctatcaattaccctaaagagaagtcaatccccaaagggattgtaaatttaaaataagaaaaattgatgaatgagcaaaaaaaatcaagagagaaacgtttcgctaataaataataccacgcttaatcacaaatccgatgtaaacatcctaataaattaatgaggaaaatatctttttctgatatcccgttacgcaaataaataatatgataattatttgaagtcagaccagagttttaatttgaagcagttgcaccatgacagtgcgtataatcaggatgaattgagtaacccttcaacgacggggttactcaagattgaggaaggattatcgttcggcgaccagacgaataatatcttcgtcttcaaccgatttaaaaaattgactctcaacggtctttttatctgctttctca

SEQ ID NO: 56 - DNA, 634 bp, Escherichia coli
  marker
cggctttgtttgtcagctcgccgactcgttgaatttcccgcaggatgcgttgattctgggtggtgaccatctggggccaaaccgctggcaaaacctgccggccgctcaggcaatggccaatgccgatgatttgattaaaagctacgttgcggcaggattcaaaaaaatccaccttgattgcagcatgtcctgtcaggacgatccgattcccttaactgatgacatcgtggctgaacgcgccgcccgtctggcgaaagtggcggaagaaacctgtcttgaacactttggcgaagccgatctggagtatgtcattggtaccgaagtgccggtacctggcggcgcgcatgaaaccttaagcgagctggcggtcaccacgccggatgccgcccgcgccacgctggaagcccatcgtcacgcctttgaaaagcaaggtttgaatgccatctggccacgcatcattgccctggtggttcaacccggcgtcgaattcgatcacaccaacgttattgattatcagcccgccaaagcgagcgccttaagccagatggtcgaaaactacgaaacgctgattttcgaagcgcactctaccgattatcaaacgccgcaatcgctgcgccagctggtgattgaccac

SEQ ID NO: 57 - DNA, 586 bp, Escherichia coli
  marker
agcctcgtaaaacctcactcaccgaacaggtagctcatcatctggagtttgtgagggccgccgccaggcaacaatgtcagctgttagtttttccatcgctttctttactggggtgtgattattcgcgacgtgcccttcctgccccacccgatctctcactgttagacccgctttgttatgccgcaacgacctggcgaatgaccatcattgccggccttcccgttgaatataacgatcgctttattcgtggaattgcggtgttcgcaccgtggcgaaaaacgcctgggatctaccatcagagtcatggtgcatgtctgggccgtcgttccagaaccatcacggtggtcgatgaacaaccgcaaggtatggatatggacccgacctgttcactgtttacgacagggcaatgtctgggagaacccgacctgctggcgtcggcccgtcgcttacaatttttttcacatcagtactcgattgccgtgctgatggcaaatgcccgtggtaacagtgcactatgggatgaatatggtcgtctcatcgttcgcgccgatcgtggttcattattgttagtcggtcagcgttcatc

SEQ ID NO: 58 - DNA, 577 bp, Escherichia coli
  marker
caacgttcgaggaaaacgcgataccagttgatgcaacaacggcgcaggtatggctgcggcttcatcgaccaccagccagtcggcttgctcatcgctggctaacaaggcatccggcgcaataaagcgaaacttctcgcccgcaaattgtgccagtacatccgttgccgcttttgcgggcgcggtgacaatcgcactgcccgcaatacgagaaatgagttgccctgccaacgccgacttaccgcgcccacgcgcagccgttaccgctgccacgcccggcggcatggtcagtagctgctgtaagagttgctgttgttctggttgtggtgcgccggtcgcggggtgccagtcagtacggggagtaaaatgcgccaacgagaacggctggttttgccgccagaggatagcgtcgttatccgccgtaagtacgcgtttgagatgctggacaaaatgcggcgtcgcaatagggtcagggcaatcactccagcgcagcgagtcggcatcaggttggttttcccactcttcccatacagggagtaacaaaaccagccagcttcccgctttcaacgttccgctaagt

SEQ ID NO: 59 - DNA, 541 bp, Escherichia coli
  marker
gtttatccgcggatttattgatgtcgcgtccagcgtgcccggcagtgaaacctgtccaccgttaagcttgccctgcagttgagtaatttccagcaaacccgacttgttggtcatttgcgtggcaacatctgtaaaattcattccgcgccagcgcacgttactggcctgcaacaaaatatcagccgtaaagccttgcagtccctgataggccggttcatcaatacgcgaagaaatgaccgggcgcggcaacgttgattggctctgcccctgctgcgcggcaccgttttcaccattcgctgtttcattaagcgggatgaggttgtcaagattcagttgcgggaattgcagtctcagctgccattccggtttctctgtcagcgtgacctgtgcttgcccgctcagcgtactgtcattggcggtcaaactaatttggttaaatgaaaggcgtttatgtgactcctgccactgggcctggaaactcccctgcccctgaataccttgttttggtaaatcggcaccctgcaactgccagttaatttgt

SEQ ID NO: 60 - DNA, 521 bp, Escherichia coli
  marker
catcgaaaccgcacttaactgcaactcttttgccacttcggtaccagcaatagacagcgttgcacgatcggcgtagttaacggcggtaacaataaaaataatcagtaatattaaatagcgggtatgcacgcctttctttttttcgtcaacggtgtccagaatcattttatttacctcgggtacttatgctgatttttattattatggggaaggtgttatttatgagtttcatttatgccgtaacgacaatgaactcgggaattagtataagcagcgcgagaataataatcattgtgcaaatgctaatttaattaatactatttaaatattattttgagcatatgcacataaggttgcgcgctaaagcacagatttgcgctttaccttgccgggcggcactgcaatccctgaaatgattgacattgatcacatttctgcgtttaaactcctgacattcttatttcacccaatgaagtcatttatttttaaatgagaccaggtcctcattttaataacccctg

SEQ ID NO: 61 - DNA, 504 bp, Escherichia coli
  marker
gttctttattttgtgccgccaataaatatcttttcataaaattagccagaaaagacgcggcatatagccctatttacaccgatgatttcgcagcacgtgaggttaaaacttcctgattcatgtcacattttatggggagattatcgtaggctgacgacctttcagtcttctgtattagtcgtgtttacgagaattccctattaagcgaatgatgaaaagtagaacagtcgcaataagagcagggacttagtattgcactatctcctggaggtcaacagagggctattacttgcgcaacaggttaaagattgtgaatagttaccagcagtcatttacccgcttataacaagcgaggcagttgtaatgatagctcagaaggattatgcaaggcttcgtaagggagaacgcatataaccacttctgtgcatactgttgagctgaaaaactgacgaattatgataaactccagccaactttatttcatatcattgagggcctgtggct

SEQ ID NO: 62 - DNA, 479 bp, Escherichia coli
  marker
tcttaccatcagtaccaagaatatgacgctcgatttgcagcacattgttcgccggtaaaggtgcggattgcggataaccgctggcatccacacgcaaccataacggctgatcgccactgttggtcacctgcaaggtggcaagttgatcgctattcagattgctgttttgcgctttctcgcctgtcagcggctcagctgagaaagaggtttgcgcctgccatttacccggtaaatcctgaatcgtacgggcagccaggaacaacgcgttactttcctgcgtcgatagccagcgttcaccaaacgcctgctgcgaaagtgtgttcagcaaagtgtactgctcatcgggtagcagtttattttcttccagcaaggagagcattaacgcgttgtcgcgcagtggactaccgtaatcacccagccatatccgctcatcactattacgcggcgttttcagcgccagcgcaatcgcttcttcacca

SEQ ID NO: 63 - DNA, 450 bp, Escherichia coli
  marker
tttcacctaccttatgtcattaaactagcatgcgttagttaaacagcgcctaactatgtcgatattcgtgctttttcggaatgagtcgcttgcttcagcgcatattgccgctacgattaagcgaacataaaaaagagaagaggttgtaatgcgattcatcattcgcacagttatgctgatagcactggtatggataggattattactcagcggatatggcgttttgattggaagcaaagagaatgccgcaggattaggtttgcaatgtacctatctgactgccagaggcaccagcacggtacaatacttgcacactaaaagtggttttttggggataacagattgcccgctgttacgtaaaagcaatatcgtggtcgataatggttaagggtaataaataaccagattctcactcatgagtaaaatattcttatagcaagcgcgtttaat

SEQ ID NO: 64 - DNA, 446 bp, Escherichia coli
  marker
gaaaaggggtaacaccgattaccccattgataacctttctttatcctcttttaaaacatctttttaacgtcaatgatgccattgcttagcgttatcatcaggtaatccgtttgcggataaccaaaaatgcaggttaattgtttttttaatagcgaaattttctattcattcgtgatcaagatcacgatgctgtggcaatgtaaaaacattgcaagaatcaggttaaaatcatttaaatttacacacgcaacaaatattgacctacaaaacattacactggctatttttcagaaactggactatctcactagtaaaaacgctaaatagcagaacatatcgccgttaagccatcaacccccctctcagtgcagtgaaaaaatctgccgttacgttttttgaaaaatttaacgctggataacatttcccggaatggttgaattccccgc

SEQ ID NO: 65 - DNA, 446 bp, Escherichia coli
  marker
gatctgttctcgtcgctcgctggtgcctgtcactcgcttctcacctgaagcgtcggtattactcatagtaagtcctttcgtaaaactttcgtttcatttcgttttgcctattaacgcctttctattaagcaaatgcaagcccaccttgcccattgacgcaagctactctcgtttcagtgactttcattatgtttcttttgtgaatcagatcagaaaactattatctttcgttttatttttatctcaccatgacgcagtatcaactgaaacaaaacgaaagattaatatcgcagtaatctgaactggagaggaaagtgaaacatctgacagaaatggtgagacagcacaaagcgggcaaaacaaatggaatttatgccgtttgttccgcacatccgctggtgctggaggctgcaatccgctacgccagtgcaaaccaaacgccgtta

SEQ ID NO: 66 - DNA, 441 bp, Escherichia coli
  marker
catccgcctgtctggctgacatataaaaagtgtggccgatccgttaccctcaattactatcgggttgatgaaagtctatggcgaaatcaactgaagctggtgcgtctgtcgaaatattctctcgatgcagcgctgaaagagaaaagcacgcgcaatacccgggaaagactgaaagatttgcccaatatgtcttttcatctggaagcgattctcggggaggtggggattaaggatgtacgggcgttacgtatacttggggcaaaaatgtgttggttgcgactgcggcaagcaaaacagtctggtgacagaaaagattctgtttatgcttgaaggtgccattatcggcattcatgaagctgcgctcccggtggcacgccgccaggagcttgcagaatgggctgactctcttacgccgaaacaggagtttcctgcggaacttga

SEQ ID NO: 67 - DNA, 439 bp, Escherichia coli
  marker
gcaaaacaacggcctggcgtttatcagtctcaagccgtggtctgaacgtgtcggtgaggaaaactcggttaccgcgatcattcagcgggcaatgattgcgttaagcagtatcaataaagccgtcgtcttcccgttcaacttacccgcggtggctgaactgggtaccgcgtcaggttttgatatggaactgctggacaacggtaacctggggcacgaaaaactaacccaggcgcgaaacgagctgttatcactggcagcgcaatcaccgaatcaggtcaccggggtacgcccgaacggcctggaagatacgccgatgttcaaagtgaacgtcaacgccgcgaaagctgaggcaatgggtgtggcgctgtctgatatcaaccagacaatttccaccgccttcggcagcagctacgtgaacgacttcctcaaccaggggcgg

SEQ ID NO: 68 - DNA, 436 bp, Escherichia coli
  marker
cattccataacaaaaacgcagcaacaaatttacgtattttttaacatcattgtagcaggtgatttttttcaggcgattatttgtgcgttcgggacgtgaatctctggtgattgaaaaatgaacagttttgtacgttctgcactatgcgaggaaggatttttactaaaaaaaagccgctggggtttaaaacacccccagcggctcgttttttacactattgtctcaggaattatctatcgtccgtcgattactcgatatccctttcaatcaacaatgaatcatccccttccggagcagacattgggctgtattgccacggattatggtagctctccatcgcctgatagatcacctgggccagctcattattactggacgggtcatagcacagcaaatattcggtatcaggtagcggcggtaagccatctactccact

SEQ ID NO: 69 - DNA, 432 bp, Escherichia coli
  marker
caactgtttcgcgccaggaatataataataggcgggtaattctgccgaaggcgtgtggcaatagtcgcatcctttttcgcggagaaagcctaaaaccttattattttcactgacagcagatgcctgaacatcggcctgtttactgcgtttattatcgtggtaccacacataaccagataaccctaaatagcaaatcgcgacgccagccaggccgatcgcggtaatacgtgagaccattttcattattcttccctcacggtggtgagttattgtgacccagaaaattttccagaatgctgcaaacgtctctgcgagacaaagccatcataaaaaacagggagatacgctttttgataggaatcaatcaattacatgaatataaactatcaataagatagcctgtgcctattacccagatcaggaatggcatat

SEQ ID NO: 70 - DNA, 397 bp, Escherichia coli
  marker
tgcagtgctgaatgcggatttgacgacggcgggtgttacgggaggtgcggaaaccgttgcaggaagcgtaactgcggcagcgtcaggcgcagtctgttgtgtcgattgcggttccacaggcgcttccactgtgcggctttttatatatagcccggtagaggcggcacaaagcccggcactgcaaattagcgccagcacatggggtttaaacggcaaagtcattttcataattcggatctcaaggaaatcgcaatggtcggcgaactgccacccgcaggtgctgtgaatccgagtataaagaggcggtagtttaaattttgactaatcttgggattcgttgagaaaggtgattatcaccatgcgaattaacgaagtttttacggagggaaacaatctc

SEQ ID NO: 71 - DNA, 384 bp, Escherichia coli
  marker
caattgcagagagaggaaatgacatgcgtcgcgctaacgatccgcaacggcgagaaaaaattatccaggccacgctggaggcggtgaaactttacggaatacatgctgttacgcaccgcaaaattgctacccttgccggggtaccgttgggatcgatgacctactatttttcaggaattgatgagttgttgctggaggcgttcagcagttttactgagatcatgtcccggcaatatcaggcattttttagcgatgttagtgatgctccgggcgcatgccaggctatcaccgatatgatctacagctcacaggttgcaacgccggataacatggagctgatgtaccagctctacgcgctggctagccgaaaaccgctattaaaaa

SEQ ID NO: 72 - DNA, 379 bp, Escherichia coli
  marker
ctaaaaaaaatatattcaaccgtatttaataaaaatatttcgtgagtctctgtgcgctaattctccatctggcgtagggaaaatcacacctgaatcaggaattaacaatgaaacctgtaaaaccacctcgtattaatggacgagtgccggtcctgtcggcacaggaagcggtgaattatattcccgacgaagcaacactttgtgtgttaggcgctggcggcggtattctggaagccaccacgttaattactgctcttgctgataaatataaacagactcaaacgccacgtaatttatcgattattagtccaacagggcttggcgatcgcgccgaccgtggtattagtccgctggcgcaagaaggtctggtgaaatgggc

SEQ ID NO: 73 - DNA, 374 bp, Escherichia coli
  marker
taatgttttaatattttcgttttttggccccgtgatttttgcaccactgaatcctgtttcaacaccttccgagaagtttaaagtgattgcctgcggtgcagctgtcacttgcgcgtttgccgcaggatactgatgcgttaaatgcgcatgtgcccagacggaaggtgtcaccaacgaagtggtcaggattgccagcgcgtagcgaagggagcgtgcagttgaagccatattatctattcctttttgtaataacttttttacagagcataaccttgtctaatgtctgagtcgaggatcatcaattccggcttgccatcctggctcactcttagtaacttttgcccgcgaatgatgaggagattaagaatgctgaa

SEQ ID NO: 74 - DNA, 367 bp, Escherichia coli
  marker
tcgggggtaagggatgcaaatacctcgcatgtcgcttcgccagctagcctggtccggcgctgttttacttctggtcggcacgctgttgctggcctggtccgcggttcgccagcaagagtctacgctggcgattcgtgccgttcatcaaggcacaacgatgccagacggtttttcaatctggcatcaccttgacgctcatggcattcctttcaaaagtatcacccccaaaaacgacactctgttaattacatttgactccagcgaccagagcgccgccgcaaaagcggtcctcgacagaacattgccccatggctacatcattgcgcagcaggacaataacagtcaggctatgcagtggctgacccgg

SEQ ID NO: 75 - DNA, 359 bp, Escherichia coli
  marker
gtgcgtacgtggtagcaacgcccatgctatagccgaatccgcgcacaaagctgtcaacaaacggttctccggctggtggtggcagataaaccggcggatacgcagtattggcccagttcccgtaaaccacggttgggttgtagttgggaatatagaccacatcaggattggcgggctcaatggaaatgacggttgttgcaggctctgtaatgacggggctggcagttgaaacggtattggatggtatgacgggagccgtgactgtctgttttaccggtacagctttcttcgttgtggtaataactttctgttcggttgatgacttcagcgagccggtttgttgcgccagttgccgcaat

SEQ ID NO: 76 - DNA, 355 bp, Escherichia coli
  marker
tccatgaacgccactaaattgttcatattcagaggttaacaagccataaagagagccgaaattctccagcatctcttttgccagggttaatacatctttaccgcgcgttccggtacgcagaaatagcgccagcagctcgacatccgttaaggcgctaataccaaacttcagcattttttcgcgcggcatcaacagctgtgcattgtttttcaccttcacctcctttgtggtgctcgcatcctgtcatagccgttccgttaaatcgacggccagttttcaatcctggaaagcgcctcgcaaagtgaatctcaggtgaaggcacgacaacaaaagtattgtgataaaatcgccaact

SEQ ID NO: 77 - DNA, 337 bp, Escherichia coli
  marker
tgcctcttcattgcttaaatctggcaacaggccattaatacggctggcgagcattgttttacctgttcccggcggcccaatcagtaaaaggttgtgcccgccagcggcggtaatttccagtcctcgctttccttgctcctgaccgacaacatcactgagatcatgttgtagcgcccgggatactgcatcagttggtttcgggcgttcgagagcgtgcttaccttccagaaacgcacagacagcttgcagatgatcggctatcaggcatccttcaccgttaattagccccacttcatcttcgttatctttcgcgacgataatttttctgcccgactta

SEQ ID NO: 78 - DNA, 315 bp, Escherichia coli
  marker
ttctggacggctgaaacaccctggcaaatgttgattgaagaagctcgtctgatcgcgcctggcgcggatggcgtgaaaatgcagtgtgatttattgtcgtgtcagaacgctggctggcaaggagtgacgcttaataccacgcgggggcatttctatcgcgcggcgctggaagggttaactgcgcaattacagcgcaatctacagatgctggaaaaaatcgggcactttaaggcctctgaattattgttagtcggtggaggaagtcgcaacacattgtggaatcagattaaagccaatatgcttgatattccggta

SEQ ID NO: 79 - DNA, 313 bp, Escherichia coli
  marker
agtttaacggtcgctatgatggcaaggtcattgtcagtggtgagtggctgttgaaccaccagggacaactgatcaaacgtccgttccgtctggaaggagtgcaaactcaggatggttacgatgagatggttaaagtgctggccggtgtctggagtcaggaagccgcttctattgcacaagagataaagcgtctaccttaattataaagatttgtaaatataaccgtctccggtatgttgcctgaggcggtttttttgtttctaacgtgcggaaaaatttgttcctcttcacattttttgtacaaccgacatgc

SEQ ID NO: 80 - DNA, 312 bp, Escherichia coli
  marker
acaagtcggctcattaacggctattcaggaaaggcatcgccacgattaataagaatttctttactgacagggtgagcagggcacttttatacctgtcagttcgttttacgcacttcttccgggctatacacccttctcggcagttttttaacgccgctatacgcctcacagggctcttaagcaccgacgttgacttgtgacctgtaaagtacaatatccctgtgtttaggcgttatacatcgtcgcaaatatgatgaaggctaatgctgtcggtttatggaaaagttgctttgggtaaacaaaaaaaacggc

SEQ ID NO: 81 - DNA, 311 bp, Escherichia coli
  marker
gagaacgtgcataaatttagcgggaaaagacataagggaaagccaatttgtcagacaaattgtcgaatgcacagcagattaatccataagattagcctggaaatccttgttgtctttggtacccatgcgggatgtcttctttttaaccagtcaataggccgcattacctggcgttgagtttttgaaatggtgtaataaccgcaactcaaagatgtggaaaatgcacgtcattcatttcgccattaattatcactgtgctcattaattaacagaacacgtataatgagagccatctcgcaaaaatgaaaaaa

SEQ ID NO: 82 - DNA, 307 bp, Escherichia coli
  marker
aaaatattgtccgaaaaatacgcccagcatcatgcggttagagagcaattgcttgatgtaatgcagtttgggtccgcttgctgccgcactgcccggctttttgtggtccatatcgaccaccgcgccattttcagagataaacttcagctcttccgcagacatacgtgggtgatctgtcgggttatgaatcaacttgatccacagcgccgtcagcacaaaaccaatcacccccataacggtaaagacgtgctcccagccccaggcgaaagtcagccagccaagcagcggcgaaaagagcgccagcgag

SEQ ID NO: 83 - DNA, 305 bp, Escherichia coli
  marker
gtggcgatgaagaggccagcctgcaacgcgcggcacaagcgggcgtaggcaagatcattgttccggcgacagaggcggaaaattttgcccgcgtgcaggcgttagcggaaaaatatcaaccgctgtatgccgcattgggcttgcatcctggtatgttggaaaaacatagcgatgtgtctcttgatcagctacagcaggcgctggaaaggcgtccggcgaaggtggtggcggtgggggagatcggtctggatctcttcggcgacgatccgcaatttgagaggcagcagtggttactcgacgaacaa

SEQ ID NO: 84 - DNA, 292 bp, Escherichia coli
  marker
caatggctttgccggccgttgaccgcgcttcacggcgatatgcgtcacgctttgtgccaggctttccgtcaaatgcagaaacacttccgcctgaatagcgtcgggtaacccctgacggtcgtcgttaatgctcacttcatatccgctgccttcagttgcatcgctcagtgcgggcacgtaacgtccatcgacaaacaccagccgcacggcgtctaacgttaacgctaaggcatcacgctgctgtggggatatctctcccgcaatgctgacaaactggctattggtcagccct

SEQ ID NO: 85 - DNA, 286 bp, Escherichia coli
  marker
acgcatccctaaccacaccacacgcgaacgcagccattgtccggcgtcatcaagcgtgagtgtgaaaccaggttgacgaatccgtccggctaaaagagaaagcgccttctctttctcggcgctcacttcgcctaaaaatgccagagtcagatgcaaattatcggcggcgaccggacgtcccgcctcaggtgggaagtgtgtggcgcgccagtggataatctgttcgcggatttctgcaggtaagtcgatagcaaagaacagacgttgcggttcagacatgtgaggc

SEQ ID NO: 86 - DNA, 284 bp, Escherichia coli
  marker
ccgatgcaaaaaccaaaagcgccggaaccgcaggaacctgcacttgcggcgaacagtcagagttttggtcgggtactgactatcgtccattccgactgtgcgttgctggagcgcgacggcaacatttcacttttatccttgccagtggcagaacgttggctgcgtcaggcacaattgacgccgggtgaagcgcccgtttgcgcccagccgctgctgattccgttgcggctaaaagtttctggcgaagaaaaatcggcattagaaaaagcgcagtctgccctggc

SEQ ID NO: 87 - DNA, 282 bp, Escherichia coli
  marker
tcattaattttacgccgctgactcacaatgaccatgggagaaaattgaaggagtcagtgaaaaaattgccattgcgttatgcgatcgcgcagacgctcagtgcgaacatcattaagtgcgaacagcgcctgcgcggcctcttcccgctgacggaccagtaacatcttgcggcctgaaagtttaagtgtggtacataactgcgcgtcactggcgtttttctgtaaacgcccacgcagcgccggtaatgccagttcactggtttgtagcagacgcaataagcaa

SEQ ID NO: 88 - DNA, 278 bp, Escherichia coli
  marker
atttgcccatgatgatatctccgtattaccccgcgccgggaatgcgcggccgccaattttagtttaggttcccggtaaagatgacattaaggaaaacgtgctgaatcctcaataatcatccgctgctgtttattatcttttttctatagatttcttaattaatcaataaattgcgtagtttttaagcatgttaatgattacgttacagaactattacaatgtcatcagttgtgaacaaagcacctggtcgcgcatactaggggctataaatttatctt

SEQ ID NO: 89 - DNA, 265 bp, Escherichia coli
  marker
cttaatctggtcttctccaaaatttttccctctgtttcttctctgtatccaatacgttaaaagatttacactgtcttcgtatgcgttatcagaaggagaatcgctatggcaactttgttacaacttcattttgcttttaatggcccatttggcgacgcaatggctgagcagcttaaaccgcttgctgagtcgattaatcaggaacctggttttctgtggaaggtatggacagaaagtgaaaagaaccacgaagccggtgggatct

SEQ ID NO: 90 - DNA, 263 bp, Escherichia coli
  marker
acggcgcagcaccatctggcgttgttgctgccgttggtgccggggtcgcggcggtatcaacatttgcctgcgaaggcgaaacaaccgcattctgttgcggatcaacagctggtgctggaaacgcagttacggcaggtgtttgcgtgttggttgcggtagtatccacagacgctggcggcgtggacgttgtagccgggtctgtagttgtcgacgtatttaacggaacactctgcccctgctcgctattactgctcagttccgcc

SEQ ID NO: 91 - DNA, 259 bp, Escherichia coli
  marker
atggatcagtgttccttccaaccacatcgcatcttcgctctcaagtttgcagaattggcgtatttccggactatccagccaggcattcagtttattctgccgcttaaattggcgctctctggcggccattacgcgttgtttaacggtggcgctgctttctcccggcactaccgttttactcaaaatgccggggggtggtaatgggatctccagtgagagatcgaagcggtcgagaaagggccccgagagccggttgaga

SEQ ID NO: 92 - DNA, 257 bp, Escherichia coli
  marker
tcgtccgtatattcgtgagcgcgttgttgaccagctggcgcatattgatctcactctggcccaggcggtggcgaaaaatctcggtatcgaactgactgacgaccagctgaatatcaccccacctccggacgtcaacggtctgaaaaaggatccatccttaagtttgtacgccattcctgacggtgatgtgaaaggtcgcgtggtagcgattttacttaatgatgaagtgagatcggcagaccttctggccattctca

SEQ ID NO: 93 - DNA, 256 bp, Escherichia coli
  marker
acaggttgctgaactcgccattcccaccgccgaatcacagcgggcgctggtcgggtctggcattgaagcgcaggttaacggtgagcgcgtattgatttgcgctgccgggaaacatcccgctgatgcatttgctggtttgattaatgaactggaaagcgccgggcaaacggtagtgctggtagtacgtaatgatgacgtgctgggtgtcattgcgttgcaggataccctgcgcgccgatgctgcaactgccatcagt

SEQ ID NO: 94 - DNA, 255 bp, Escherichia coli
  marker
tgttaattttcaaaaatatcactacccgcagcagggaaataattcccgccaaatagctttttatcacgcaaatattttgtggtgatctacactgatactctgttgcattattcgcctgaaaccacaatattcaggcgattttttcgctatctttgacaaaaaatatcaacttttctcgatttgctctcagcccttatatcacgggaaattccggcgatttgctcgcatcaatattcatgccacatttgccatcag

SEQ ID NO: 95 - DNA, 254 bp, Escherichia coli
  marker
cgcaatggaagcaaggcattacaggcttaatttaaataacaaaatcctaagcagaaaaacgactttttataatataaacatttaacatgataatattaaaaacagactttattatcgtaataaaaaatcgcccaaacattcctgttcgggcgatcaaattaattattgtttatcctgcatatacggcgtgtacaccccgttcagactgtgcaggaaagctacgatatcatccacatcctcctgcggcagctctt

SEQ ID NO: 96 - DNA, 245 bp, Escherichia coli
  marker
tagcgttgccgcgcgctcagagttaattgttgacgaagaattcccggtggcaaattacgttgatcagttttaatacaaggtaaaaaatgttatacgcagttgcgcaaattatccgcctttacgtcactttatgagcaattcgcatataaaatgtaaaacttttgtactagcataaacacagaaacgaatactggcgacctggtcttgcggataaagcggtaatgagcaaacaatcacagcatgta

SEQ ID NO: 97 - DNA, 242 bp, Escherichia coli
  marker
tgcagcattaagtttagctgctcgccggagaaggtgtcgccatcacacagggaggcgacctctttacactggcggaggatccactgcgggctaagcggaagtgtttcttgttcaccggtgtagcgtgctgcttcgcggataagtaccggccaggcatccgctcccggtgcaggtaagtgattatgtctggcggtaaatgtcacccagcgacaccactgggttactgactccgcatcgacaat

SEQ ID NO: 98 - DNA, 236 bp, Escherichia coli
  marker
accaatcggtaaagatgacgtattcgaagcaaagatggtatgagcggcgcaattttgctcaacttccgccaccatctgttgtttcaattcgagattttcaaacaccgcttcaataatcagatcgcgatgggcaaagccgcgatagtccgtcgttccggagattaatgccagctgtttgtcacgttcgctggctttgagatgacgacggcgaactttgccctccagctgatcccaac

SEQ ID NO: 99 - DNA, 235 bp, Escherichia coli
  marker
ccacggaatggggacgtcgttactgatccgcacgtttatgatatgctatcgtactctttagcgagtacaaccgggggaggcattttgcttcccccgctaacaatggcgacatattatggcccaacaatcaccctattcagcagcgatggcagaacagcgtcaccaggagtggttacgttttgtcgacctgcttaagaatgcctaccaaaacgatctccatttaccgttgttaaac

SEQ ID NO: 100 - DNA, 232 bp, Escherichia coli
  marker
aggtgtcacaaagggagtgaccatgagaacaggatgtgaaccgacccggtttggtaatgaagctaagaccattattcacggtgatgcgcttgccgaacttaaaaagctccccgccgaaagtgtcgatctgatctttgccgacccaccgtataacatcggtaaaaattttgatggtctgatcgaagcctggaaagaagatctgtttatcgactggctgtttgaagtgattgca

SEQ ID NO: 101 - DNA, 229 bp, Escherichia coli
  marker
actccatcgcctgttttgaaaagcccggtatgcgtttgcatccgggcattttttgcgtgcggctttccataaaaatgcaactcttgcagcgcgacgtaagttcctctgaaagcgtctcgcagggatgaaaactcgctaatgcacaggtgtggagtggcgcgtagagtcgcggcattcaaacaacaggtgaaggaacgccatgagcaaaaagcagagttccaccccacac

SEQ ID NO: 102 - DNA, 229 bp, Escherichia coli
  marker
ctgacaacggcgatgccaactactacctgatggaagcctacaaacaccttaaaccgattgcgctggcgggagacgcgcgcaagtttaaagcaacaatcaaggtcgctgaccagggtgaagaagggattgtggaagctgacagcgccgacggtagttttatggatgaactgttaacgctgatggcagcacaccgcgtgtggtcacgcattcctaagattgacaaaattcc

SEQ ID NO: 103 - DNA, 229 bp, Escherichia coli
  marker
tcgtggcgtgagaggatgcgcttaccggacgcataataaaccccatagcgttaccttcatttgccgcatcaacaagttcagcatgctcttcttcagtcaaatcatctgccaaccaaccgatcaccacactgtaattgcccgtgcgtaaagcgcgaaccattgactccacagtgtggcaaggggagagctggctaatctgcattactttcgttaagggtagcccagatgc

SEQ ID NO: 104 - DNA, 229 bp, Escherichia coli
  marker
acctgccagcaccggcttcatcattggcgcgcttggcttaatggcttttgttggttggcaatggcgcggaagaatgcgccgtcaggctttgggtttgcagtctccggcctctaccgcagtagtcggtcgccaggctttaaccgctatcatcgtattaggcgcaatctggctgttgaatgattaccgtggcgttcccactcctgttctgctgctgacgttgctgttactc

SEQ ID NO: 105 - DNA, 224 bp, Escherichia coli
  marker
tctcgtcatcatccgcagctttgcgctgcggatatctgaaccggaaataatcactatttccggttttttattctcttaatttgcattaatcctttctgattatcttgcttaactgcgctgcatcaatgaattgcgccatctcactttgcatacttaccactttgttttgtgcaagggaatatttgcgctatgtccgcaatcactgaatccaaaccaacaagaag

SEQ ID NO: 106 - DNA, 224 bp, Escherichia coli
  marker
agcagtaacataaaaagggaaacgtttcgcgcgaaacggcgataagcgagagaatgtaaggagatggcgtgcatcgggcaaactccgtacagagaggagaaaattcgcgcaatcatggcacctttcgctaaagcgtgcaagccaggactttgcgaacaaacaagccatcgacggcaccaaaagttcataataagaaaatcaaacaatacagctaacaggaactc

SEQ ID NO: 107 - DNA, 222 bp, Escherichia coli
  marker
tgccgccgaagaggtgtaatcgagtcgatgcctgatgacatgcaatgattaaaaaaaaaacaggcatctatagtgaggctattccacgcatcatgcatgatattcacggggaatagcgttaatggcagataatccagacccttcatcgctcctgccggacgtgttttcaccggcgacccgcgactggtttcttcgcgcctttaaacagccgaccgctgtcca

SEQ ID NO: 108 - DNA, 221 bp, Escherichia coli
  marker
gttgaaaaagacgcttatgtgctggctgaaggtcaaaacgaactgcaggtgccgatgacgtataccgacgcggcaggcaacacgtttaccaaaacgtttgtcctgaaacgtggtgattacgctgtcaacgtcaactacaacgtgcagaacgctggcgagaaaccgctggaaatctccacctttggtcagttgaagcaatccatcactctgccaccgcatct

SEQ ID NO: 109 - DNA, 218 bp, Escherichia coli
  marker
ccacaatggcccgttagcaacgtcgaataattattatgcgtgagaatttacgttatgtaattcagtatcacgcccatacaatccgaattttagtgagaattgtggctcagacagccaaatcagcctcttttgcttgtcgcttttcactaaacatccgacaatttagcctaaccccggcaaaaatggagatgcctatgtccacgacatggtttgtagga

SEQ ID NO: 110 - DNA, 217 bp, Escherichia coli
  marker
agcgcatgaaatggtgctatcagccgataaacggggatcgtgatacagcgcaaaacccaacgccactttttgcgcatcggtaggcagtttttgcgggatgggctgcaccggttcattgcgatgctccggagcagtatcattgctggcgtaatattccgcgcgctgttttgcaatccaggccagtatttccgcccgctcttcatcactcaccttaccc

SEQ ID NO: 111 - DNA, 216 bp, Escherichia coli
  marker
attaattcctttcaaatgaaacggagctgccatgctccgtttacttcgtcattatttttactttgttcccgcgcagttatcaaaagcaaaaggaataggtaaaaatattcttctcaaattacagttagttataaggatttccttaactgcttctcctcaccatcatgttattttcgccacatcataatcctgggcttgctgaagaataattgaaat

SEQ ID NO: 112 - DNA, 214 bp, Escherichia coli
  marker
agcgacaacttgcgttaaagtcgcaaaattatcatctgcactcactgcgtgacgtaagcggatggagtggccggaaacctcatagtgaccgcccaccagttggcctgcatcgctttgtagcgtacgcgcggcattggcaataagattcagatactcagactcttccggggccttcgccagcataaaagaggaggatgctcgcgtatgcagcaac

SEQ ID NO: 113 - DNA, 211 bp, Escherichia coli
  marker
agaaaattccattgcgacaatccttgttattgcgttagcgcccagcgttttagcggcgtgtagcgtgtgcgtccacgggcaaacgaggaggcgtaaagggtgaactccgtcaccgcatacgaccagttaaaacctggcggcgggattgtcaccgcctcgctggcgtcgcgcaataaggtaatatgtggatgaaacggacgattgctttgaa

SEQ ID NO: 114 - DNA, 211 bp, Escherichia coli
  marker
atagtgctgaccgagcaacataaaaaacagcaccgccagccccagcatgttcaggccgagaatggcacaaagatattgcttccagttcatctcacggtcagagacgccaagtgcgcgaaagagtacgcgttcaacgcccgttgtaccgggaagaggaatgtcattaatcagccgcgccagcccgctgcctaaaggacgcgccagcaccatt

SEQ ID NO: 115 - DNA, 210 bp, Escherichia coli
  marker
gagggagaacagtggttttcagcatctggctgcggcgaaatccacagccagtcgccaggtaaggcatcacgcaacttaagcgcatgatcaaaacaccaaccctcttccccgctcaacaccagcaagcggcggatcccttcacgtttcatttgcgctgttaatgtgtgaagcgcagtcagttcagccatccctgccccggaagttaaatgc

SEQ ID NO: 116 - DNA, 208 bp, Escherichia coli
  marker
taacgcggcggcaaccacgcatccctgaatctgtacccgccacttgtctttaaaagagcggctatccggcgcgttgttaatcgtgcgggcgggtggttcatcaagcgcgaccagcacctgatcgagatcgggggcgatgcgcgccagtcggtcagcaaacgtttcccgacgccaccagcggcgcgaggccgggcgaccgagaataatc

SEQ ID NO: 117 - DNA, 202 bp, Escherichia coli
  marker
tggttccaccagcgaattacgcgcgggtgttaacggcggttctggtattgctttaacgggtagcccgattactcccagagcgacaaccgactccggcatgacgaccaacaatccaacgctgcaaaccacgccaaccgatgaccagttcaccaataatggcggtcgtgtcgatgcggtgtacattgtggcaacgccgggtgaa

SEQ ID NO: 118 - DNA, 198 bp, Escherichia coli
  marker
tcgcttttcgccattatagctaacagttaataaattgtagtatgatttggtggctacattagcatgttttgcacaactagataacaataacgaatgatagcaattttaagtagttaggaggtgaaaaatgctgtcaaaaggcgtattgtcagcgcgtcttttcaaccttatttatggctaacattatccggcttttgc

SEQ ID NO: 119 - DNA, 197 bp, Escherichia coli
  marker
taattatctttcgatcatgcgcgattaaaggtgaatatgctaaccaatctgtagcggcttagaaaggagaaaatcaggttttaacccgatatcaacccgataattgaatcattaatcaggcatgctccagtgaaaaattcgggtagtgctcggcaaaatactggcgtaaaaattctaccgttatccgcactttcgct

SEQ ID NO: 120 - DNA, 196 bp, Escherichia coli
  marker
gactccacggacatgtaattttgataacgaacaacgttgacctttgttacaattagattcaatttgaatttatgtttttgaatgctttcttatctcacgatttaacagggaatagttcaggctgtgttgatgtatcaaacccgcagaacataccaaaacagcaataacattgcggtagtgcatcattttaaaacca

SEQ ID NO: 121 - DNA, 196 bp, Escherichia coli
  marker
aacctttaacggcgtttctggctcgcttcgccataacgtctgttcaaatgcggaaatgacgatattgccttgtggtgtatgggtgaagttttcatcgtcaaaaaccagtgcctcactaaccattttttccagcgggcatccctgcgcccagcggatcggctgttgcagttcaaaacggtgtaaatgcggaaagcga

SEQ ID NO: 122 - DNA, 191 bp, Escherichia coli
  marker
cgtcaaaatgtagaaggcgactttctgcgcatcaaaaagataaaaggcattagcgcaccagagttccccttcctgctgcacacaccaggtgacaacatgttgttttgccagccaacggctgatggcggtgagtgtttccattgctgttctcttttatactgtgggcctgaccttaacatgcgacgcagacg

SEQ ID NO: 123 - DNA, 191 bp, Escherichia coli
  marker
gcaattccatacgtttaatgtcgccaactacgaagaggtagcagaccatcgccatcagcgctgaacatcccacgaaaaccagtgctgcattgaaggagtgcagttcacttaccaggtagccaatcaccagtggagtgacaatggaggcaacattgccaaagacgttaaagacgccgccgcagaggccaaca

SEQ ID NO: 124 - DNA, 188 bp, Escherichia coli
  marker
tactcgtgctaattcttctgctttacacggcgcgtaaatacgtattatggcgtccatactggtatcggaaaacggcaaacggtggctggaagcgacacaaaaagtgacctgcggatagcgtttcgccgccgcttttatcgctaccttcgagacatccaggccaaacgtggtgatttcgggcaacgcat

SEQ ID NO: 125 - DNA, 188 bp, Escherichia coli
  marker
agataaatgctcggcggggcagtagagttaatgaagtgttactgaacgccgaagctcactttttaaaattcgttcttccatgcccggtaacgctccagaaaacggctttaattgttgttatgacgctattacctcggtgaaagtgattattcactgttacatacgggttacaacgttaaaacggtgca

SEQ ID NO: 126 - DNA, 187 bp, Escherichia coli
  marker
agttatagttttttcgtaatctttactgaaggttgcgttgttgagtgctttgacctccttgccaatagtaacgatcaaatcacgtttcggttcgaggtggcgtaaacgcagctctttaagattatctgacagctcccaggcaccatccactttgccgctttttttatcgacgacatgaataacgcgt

SEQ ID NO: 127 - DNA, 186 bp, Escherichia coli
  marker
ctgcttatgctgatcggcaacggtttcacccggtaacgctaacccgctaatggtggcctgaatttctccatcgccataacccggcaatgctcgcaccgggataaacagcgtagtacgcacacctggcgctaattcaacggctgcgggtgaatcgctgaccagttcaagcaaaccactggcggtcag

SEQ ID NO: 128 - DNA, 184 bp, Escherichia coli
  marker
tgtattcatggcctgctcctcacctgattaattttttctttctgttttgctttcgttaagcaacttttagctcacttattatttaccatttgataacaaatgtttggtctttcgtgccatgtaaaaaaaccgccccgaagggcggctctgtttatttcacacagcgggtgcattgtgtgagttg

SEQ ID NO: 129 - DNA, 183 bp, Escherichia coli
  marker
gcggggcttgcagaacacaaaaatgaaacactctgtttgtttcattaattttgtgaactatatcacaattgattgtttgttagccatattaggccgtgacttttattgctgtacagattatgtggtttttcagtggcattaagggcatatcttcccgccgcctctgcattcctgtaggaaatt

SEQ ID NO: 130 - DNA, 183 bp, Escherichia coli
  marker
caaaaatcgcgaacgttcaattattgcacctgttttgccaccttcggtaaatcgagcaacaaaactgacaaatccgatattgtcggcgtcctgccaacaatgttcaaatacggtcaatcccaaccattcagtatgcgcaaatccggcaatcaattcggcacgtaacgccgctgctccacaaga

SEQ ID NO: 131 - DNA, 183 bp, Escherichia coli
  marker
caataattacggtatcagtaacacgatgctaatgggggcgggtatctcgctgtttggcttgttgatttccgtagcgtttgccccggagactcgagggatgtcactggcgcagaccagcaatatgacgatccgcgggcagagaatggggtaatttgttcagatttctctcttttctgaatcaat

SEQ ID NO: 132 - DNA, 183 bp, Escherichia coli
  marker
tcgaacacttcttttgctgccagtgtttgccagacttctggcttcgcacgccaggcaaacggcgtcatctgcaataatgcgacggcttcatcaccgcgaagacgcatcggataacacaactcatcactctgctgtaatgtaaaaccttccagttgttctgcatgaggtgcatgaagatgtact

SEQ ID NO: 133 - DNA, 182 bp, Escherichia coli
  marker
tagcgcgaagaacgacgacgaagctgctaccgcggcaaaaattgccgccattctcgaagagccgccacggatgggcaatagtgacctgggcgtggcgttttcgcgcaatcaaccagcctggcagcaacgtagtcagcaactgttaaaacgcttaaacgtacgcggcggtgaggcagacagtt

SEQ ID NO: 134 - DNA, 180 bp, Escherichia coli
  marker
aaaggcgggcgagggcacgctgtttctgcactcgaaatgccgcaagcgcctctgcaaccgggatgggattgtccgcaagcgccagaaatacctgccaaagaaattatctggaaaagtgaacggttgaaaaattcacgtcgtgtatggatttttaccaccggcgatgcaacagcagaagaa

SEQ ID NO: 135 - DNA, 180 bp, Escherichia coli
  marker
taatgcccatcaactgctgttaccgactgacgatgaagggcaaaacaacgttaccgaaaactatttcctccactgataactcctttcgagcacgcagtcgctggtgcagtggctgcgcgctgcaaaattatctgctgtttttaaccttttcttaaagattatttcacttctcttgtgtcg

SEQ ID NO: 136 - DNA, 180 bp, Escherichia coli
  marker
cccttcattgtggcaacgtttctgccaattttatcaacaagatcctttgcagagactgcatcacgctaatgatacagactcgttttcggcgacgaatgttcattaattaacaactttgcagattaattaaccaattgaaatgacttatgaaatttagtgttgacagacaaggtaccgcta

SEQ ID NO: 137 - DNA, 179 bp, Escherichia coli
  marker
tagtttcctggagtcagattatccgcgctacagtagcgcaaattgcggggaaacagcaattaacctgccaatattgaggatacaaactattttcttctacctctaaaggacgatgcacgctatgcctccctgatgatgtatatcaaagtaaaaccgccattttcccttattctgtagcg

SEQ ID NO: 138 - DNA, 178 bp, Escherichia coli
  marker
gcatgaccaccagcgtggtgttgttggtgtagttacataagatgatggtggaagccagcaacattcccagcacaatcggtagcttacgtgccagggtcagggataaaccgcgtttgatcagataatccgagaagacacctcccagcacgccgcccgcaaaaccacacagtgccggaat

SEQ ID NO: 139 - DNA, 178 bp, Escherichia coli
  marker
ttaatgcatctttaatcgggaactttcatgaaagcaccaggcttgcccgccgatcaacaatttttcgccgatctgttcagcggcctggtgcttaacccgcaactactggggcgcgtctggtttgccagccagcctgcctcgttgccggtgggcagtttatgtattgattttccccgtc

SEQ ID NO: 140 - DNA, 178 bp, Escherichia coli
  marker
acgttgtctgtcgcgctgccagtgtactttatgactttggggctttatgcctgaaacagaagggcatttcaatcagcctggggcgataacaccgcaaaatggatactttgtcatactttcgctgcaataacatctctgcgagacggcttaacatgcctgttgtaaactgtgagccaaa

SEQ ID NO: 141 - DNA, 174 bp, Escherichia coli
  marker
accgtaactgtctatgattaatgaggcggtggttaacactaccgcttcgttgtctggacaatcgttcctttgtaataggtccgaatcacaatggaaggttcaagaatgaaataccgcatcgctttagctgtttctctctttgctcttagtgccggtagttatgccactaccctg

SEQ ID NO: 142 - DNA, 172 bp, Escherichia coli
  marker
caagtttatccagcgccagattgagttcaacaatgttgacgaccggctggccgatatatttcaccagcggttgttggctgtattttgcgatcagttgcgtgagctgttcaacgctgagattacgcgctttcgccacgcgtgggatctgccaggccgccgcttgcggggtgat

SEQ ID NO: 143 - DNA, 172 bp, Escherichia coli
  marker
taattgtgacaccagcgaactgggtggtgcccgcttctcgtttagctggccgttatggcataacatcccgcaatttacctctgcctgacactacgcgcacggtggtcaagtcaccaccactgtgctataaaataaggatgttgtaactaaagtggttaatattatggcgcgt

SEQ ID NO: 144 - DNA, 170 bp, Escherichia coli
  marker
ttctgacggcgttaaataccgttcaatgcgtagatatcagtatctaaagccgtcgattgtcattctaccgatattaataactgattcagaggctgtaatggtcgttattcatcacccatcgcttttgtgatggcgaccattgacttctgtagagggtgaagtctctccct

SEQ ID NO: 145 - DNA, 166 bp, Escherichia coli
  marker
aaaaccttgccattaaaaagcccggatcgcgggaagcgcctccgggcgtttaacattcactcaacctatcaggcgctttgtgcgagagcaagttcctcatcgcgggtttcgatacgctcgtcgccgttatacagccgcgcatgttgcagaccaacgaataaacgct

SEQ ID NO: 146 - DNA, 163 bp, Escherichia coli
  marker
acgcttaaccctgcttaacgagaatgcaccctcttgtttcatcgccttaaccgcattggctgactgagcaaactcatcttcgctctccgtttccaccgttttttccatcttcagtatcagcgaagtaatagcaaaggacaccagggtacctaccgtaacaccg

SEQ ID NO: 147 - DNA, 163 bp, Escherichia coli
  marker
cattctgaaagccgcgccggaaggcggtcacaaacctaacgccctgttcgcacgcttcaacacgctgtttgaaaaatcaactcagcactataccgatagcacccgctcgctgttgcgttgtaccggtcgctacatggtggtctacctgctgatttgcgccggg

SEQ ID NO: 148 - DNA, 163 bp, Escherichia coli
  marker
atcgtcagcaacttcctcccgccgtgtatgtgttgatcgacgctatcgacaccacgcaccgcgcccacgaactgccgtgtaatgcggatttctggctggcagtacagcaagagttattacccctggtgaaagctattgccccttttagcgatcgcgccgatcg

SEQ ID NO: 149 - DNA, 161 bp, Escherichia coli
  marker
accaccaacgagagctatccatgacacaatactaaaggccggtgaataggttgatattttgttgtccatcacagtattcctttcattcctgaatgtgtaagagctttatgttgctcatgccgagcgaaacaaacgcatttgaccaaacaagcagacaaaaa

SEQ ID NO: 150 - DNA, 160 bp, Escherichia coli
  marker
tagtgataaagaaaccaccattagccagcagagtgccgccattttgttctgcgtcgaaggcgatgcaacgttgtggaaaggttctcagcagttacagcttaaaccgggtgaatcagcgtttattgccgccaacgaatcaccggtgactgtcaaaggccac

SEQ ID NO: 151 - DNA, 158 bp, Escherichia coli
  marker
accgtattggggctcatcggatttggcctcgctatttttacccttcagggtcgcgtagagaattttactccccagatagagcaaataaaacgcaccaagataacgtacaatgttgaataatatcggggtggtcttaattaatgtcgccactccagccc

SEQ ID NO: 152 - DNA, 156 bp, Escherichia coli
  marker
acgacgattgctgaacaggccagtctgcaacaaaaggcgttatttgatcaggtgctgccagccgaacgctataacaatgcgctggcacagagttgctatctggtaactgcgccagagttaggtaaaggtgagcatcgggtttacatcgccaaacag

SEQ ID NO: 153 - DNA, 156 bp, Escherichia coli
  marker
atgcgtttacattttgaccaacactccgccattcagcgcggattcatatagctttgaccttcttattgcaggtcagttgcagttgttttccaaaaactttccccacgcgcgcccatctcgaccaaacgctcgcaaggggtaaaacgggaaccatac

SEQ ID NO: 154 - DNA, 154 bp, Escherichia coli
  marker
gccaacgttaatccagcatgctgaacgcctgaaaatgctgattgcccagttcgccgcggatccggcgctgttgtgcggcgatgtcgatattatgctgccaggtgagtatgcgcagctggcgcagatcaacgccactcaggttgagattccagaa

SEQ ID NO: 155 - DNA, 150 bp, Escherichia coli
  marker
caacaatgcgccttaccggcaggctgggacattgtgtgtcagccgcagtcacaggcgtcctgccagcagtggctggaagcccactggcgtactctgacaccggcgaatttcacccagttgcaggaggcacaatgagccagcatttacctt

SEQ ID NO: 156 - DNA, 148 bp, Escherichia coli
  marker
tccgcaaattttacaagccaccggtattccacgccgactcttccctcgtctggtggaagcgggtgaacagattggtacgctacagaacagcgccgcagcaatgctcggcttacccgttggcataccggtgatttccgcaggtcacgat

SEQ ID NO: 157 - DNA, 145 bp, Escherichia coli
  marker
gagctggctgcatttgccgctcatcttgagcaacacaagctattggttgcccgcgtgttctctttgccggaggtaaaaaaagaggatgagcataatccgcttaatcgtattgaggtaaaacaacatctcggcaacgacgcgcagt

SEQ ID NO: 158 - DNA, 145 bp, Escherichia coli
  marker
ttctttcggcgggtgaaacatttttctctcgggcgcacgttaggcatgaccattattgcgatgggcgtgacttttttactgttacgcgcattgcagggagtattgttcaacgttcccacgctactggtgtggctgctgattggtt

SEQ ID NO: 159 - DNA, 144 bp, Escherichia coli
  marker
aacgtctgcttactgcccctctacctgcttcggccgataaagccgacgataatactccagacgttgtagatataacggcacgctttcatcgggtattccggacggaatcgcgttacggggaggaagttttttcagatactcccg

SEQ ID NO: 160 - DNA, 143 bp, Escherichia coli
  marker
atggttaaacgcgggaggcgagatccatgcttcgaatattgtctggcccgaatcggtagatctgattgttgatgcgctgctcggtaccggcttgcagcaagcgccccgcgaatccattagccagttaatcgaccacgctaatt

SEQ ID NO: 161 - DNA, 143 bp, Escherichia coli
  marker
atccgtaatgcctgatgcgccatgtttatcaggccaacggtagaattgtaatctattgaatttacgggccggatacgccacatccggcacaagcattaaggcaagaaaattattcgccgtcctgcgtttcttctacaggctgc

SEQ ID NO: 162 - DNA, 142 bp, Escherichia coli
  marker
agagggcgtgttacttgaaaagctaaaagctggtgaagttagcgccgaaggtctgcgcattgtgctggaagcgggtattcgcgagccgatgatcatgcgggccaatcaggcgctgtatgcgcaattacaccccataaaagaa

SEQ ID NO: 163 - DNA, 142 bp, Escherichia coli
  marker
tgctggtattgaccgcgtgttaagcgtgggtaaacaaagccatgctatcagcaccgccagcggcgttggcgaacattttgctgataaaactgcgttaattacgcgtcttaaattactgattgctgagcaacaggtaattacg

SEQ ID NO: 164 - DNA, 142 bp, Escherichia coli
  marker
cgttttccgcgccagtgggcgatcgttcgctggcgttacgggcggaatatcgcgttaagcaactgaccaaacggcaaaaagagcgtctggtagcggaaggcgcagggtttgcagagctgttaagcagtctgcaaaccccgga

SEQ ID NO: 165 - DNA, 141 bp, Escherichia coli
  marker
acaacattatgaatggcgaggcaatcgctggcacccacacggaccgccgccaccgccgcgccaccataagaaagctcaatgatcatcacggcggtcatggtccaggcaaacatcaccgctaaatgacaaatgccgggtaac

SEQ ID NO: 166 - DNA, 139 bp, Escherichia coli
  marker
gataagagtgtgtcggcggtcaatttcccttaagtaacgctatgttagggtgttgtgttctggatatctggggcatgacatggaagacgactgcgacattattattattggtgccggtattgcaggcaccgcttgcgcg

SEQ ID NO: 167 - DNA, 139 bp, Escherichia coli
  marker
ccggcacctttaccggggcgcagcgcttcggcagatattctgcgcctgaaactggaatttaccgacggggaattccgccagctggctacgcaactttcaggtgtgcagcgtaccgatttagcccttgcgctggcagcct

SEQ ID NO: 168 - DNA, 139 bp, Escherichia coli
  marker
ggggcttaaagaagataaacgttagcacactgcgagcgaggcgacgaccattattgtcgattaaattgtgtctgcggcttgaccttcccgtaaggggaaggactatgctcaacgtttgattttgtttcgcctgcttaag

SEQ ID NO: 169 - DNA, 137 bp, Escherichia coli
  marker
aactgcgtatcaaatgcagataacgtaataattgcctgagtggactattagaaagtcaaggtgttcaggcgtttatttgtaaagttttgttgaaataagggttgtaattgtgatcacgcccgcacataacccacagg

SEQ ID NO: 170 - DNA, 133 bp, Escherichia coli
  marker
gaataagttatgataattgagcgcgtgaatattacgctcactatcaattcttgggaataattattcagctcttttgcgtaattctgaagagcttaaaatcgtcacaccttcatgctcaggccgcatcgcctct

SEQ ID NO: 171 - DNA, 133 bp, Escherichia coli
  marker
agaagagatattttgaatttatttgtcattaaaccatcaggatgcgtgatatgtcatccgatttaatgttctcaataatgagcaaaattctgaccggtgtaagcacttgcttacataacaatatacaattgct

SEQ ID NO: 172 - DNA, 133 bp, Escherichia coli
  marker
gcaggtacgtttaaatgagaattgagatgccggtgaaccatcatgctcacccacaccgcgaaacatccgttaagttaaccgttatcatacagtataagaccgtctgtgtgctcgtgacaaagcccacattcac

SEQ ID NO: 173 - DNA, 132 bp, Escherichia coli
  marker
aggatggctaaggtccagtgaagtaccctgggcaaagagtttcatgatgttatccctggtatgaattgataagaaaaaaccccggagcacgccccggggttttcggtacaaatacagtcatctgatgcggga

SEQ ID NO: 174 - DNA, 132 bp, Escherichia coli
  marker
catcagataaacaaattcatttttccggtgccattcaccgggtagatacaaaagggggagaaaagtatggaactctacagagaatatcctgcatggcttatctttttacgccgtacttatgcggttgcagcg

SEQ ID NO: 175 - DNA, 132 bp, Escherichia coli
  marker
taattccgcggccgtgatggagctgttgttcactaaccgtgtctttttaatcggtctgatcatcgcgcaattagcattggttattgtgttatcagcgatgattcaaaagctgagcgcaggtgtaacgacgat

SEQ ID NO: 176 - DNA, 131 bp, Escherichia coli
  marker
tgacaatcacggcaagaaagcccctcaatttgctgcgttcaaaccgctaaccacggtacagaacgccaacgactgttgctgcgacggcgcatgttccagcacgccaactctctctgaaaacgtctccggca

SEQ ID NO: 177 - DNA, 130 bp, Escherichia coli
  marker
tattgcgacgcatgtgcgtccgaacagtgtgaccttcagtagccagcagcagcgcctgaactggctggtcaacgaaggttactatgatgaaagcgttcttaatcgctactctcgcgactttgtcattacg

SEQ ID NO: 178 - DNA, 130 bp, Escherichia coli
  marker
gaatcggctcatctttatatgcagtcctgcagaatgaagagtgatttatgtgatttgcatcacttttggtgggtaaatttatgcaacgcatttgcgtcatggtgatgagtatcacgaaaaaatgttaaac

SEQ ID NO: 179 - DNA, 127 bp, Escherichia coli
  marker
tccagcgatggttttagcaaccttactcggcgcattaatcggcgaaatttgtctgctggagaaaggcgtcaatacagcagtcgccaaagcacaaaatctgtttcgtcactcacgtaagaagccagcg

SEQ ID NO: 180 - DNA, 127 bp, Escherichia coli
  marker
cgtttccgggggttgaatacgctgccggatgacgacttaacgtttcatccggcgttccttgcaagcgggaggaaacagcgccctccccggcatattactcttcgctatcaccgctgctggcacggcg

SEQ ID NO: 181 - DNA, 126 bp, Escherichia coli
  marker
tacccggagtgttgtgtaacaatgtctggccaggtttgtttcccggaaccgaggtcacaacatagtaaaagcgctattggtaatggtacaatcgcgcgtttacacttattcagaacgaattttttt

SEQ ID NO: 182 - DNA, 125 bp, Escherichia coli
  marker
taacgcgggctaaatttgcattacctgctaatgtcggctggtggtactatcgtcgccattcgtataagtaattgtcttaattatgctaactcgcctccttttcagaacttagccccttcggggtg

SEQ ID NO: 183 - DNA, 124 bp, Escherichia coli
  marker
cggataattaacggcaatgcgctgtgccagttgttggcaatcttcggacgtgcaggtcagcaaatcgagaataaaccactgtggctgacgtccagtttcttcgtttatgtggctggctacctga

SEQ ID NO: 184 - DNA, 124 bp, Escherichia coli
  marker
attttttgttagccggataaggcaccgctgcgtccggcaatttcaccgctcagtacatgcgtttacgctgcgtcgatgcacagcctcatcattttgcagtatccttaagatattccttatatct

SEQ ID NO: 185 - DNA, 124 bp, Escherichia coli
  marker
atgaccgcgaaatgagtgctgtctcgggcagcaaagttaagtagaatccgcggcgaccattcgacaaaagaggtgaatcatgcaggatttatcattggaaagcacgcctggcagagctaaggag

SEQ ID NO: 186 - DNA, 124 bp, Escherichia coli
  marker
aagcaaacgacgcgtgttacaactgccgccgaacgacgttcagcggattcttccatccgggataagaaggaaacggcaaatacgaccagcgcgcagagcattgagcgccaacggggaaggctta

SEQ ID NO: 187 - DNA, 123 bp, Escherichia coli
  marker
tgcaggcattatagtgatccacgccacattttgtcaacgtttattgctaatcacgtgaatgaatatccagttcactttcatttgttgaatacttttgccttctcctgctctcccttaagcgca

SEQ ID NO: 188 - DNA, 122 bp, Escherichia coli
  marker
attttattcctgcatttttgccacgaattgcaactgtcgggcatggtcgtcatcaacacgacgcatcccgctaccgcgaaaacctttgatcctgaaagacacgcagtgcagttggttaatta

SEQ ID NO: 189 - DNA, 121 bp, Escherichia coli
  marker
cgctacgacagaatattgcctgaaaacgggtggttagtcgcaatcacattactgatcatggttttgcctgcgctttttgcgtaagctgtgccggtctttttatcgaaagaggttgtacaaa

SEQ ID NO: 190 - DNA, 121 bp, Escherichia coli
  marker
ggcatctgcttcgagcggcgtggcttcgacaacaaagggtgtctgcggatctaacccgcgttcgcgcagtgaagccgcacaaacccagcactgttcaatgtcgtacagacccaacaattta

SEQ ID NO: 191 - DNA, 120 bp, Escherichia coli
  marker
atgcaacagctaaagactaaaactatcagccaggtcattatcgcctggctgatttttagcttactgtaaattatctcatttattacatacattagcttacaatcgctttaaatatgacag

SEQ ID NO: 192 - DNA, 120 bp, Escherichia coli
  marker
acaagcgacgcgaatgacgcaatcttttaagcgcggatcgaggccggaaatatcaatatcattcagagtattaagactaccgccgccaaaaccaatttcattgccgttggcgtcgcataa

SEQ ID NO: 193 - DNA, 119 bp, Escherichia coli
  marker
caggccgccttttttacgcgcccagctgacgggtagccaggtgcaaccattaagcatcgcaatctgttgctgtgccagttcagcagaactggttgtcagaatgggcacttcgtcagcac

SEQ ID NO: 194 - DNA, 118 bp, Escherichia coli
  marker
ttgcgaaatagtagccaggaatgcagggcgcatagtgtaatgctttgctgccgttgtgaccagtatgagcgttatcagcccttgggggtaaaaatcctgtaaacttaaagcatattgc

SEQ ID NO: 195 - DNA, 118 bp, Escherichia coli
  marker
agtcattaatggcgcatcggcaggcgctttcagaaacggcaacatcatcaaaccttagacatagcgttgaggtagagaaacgctgacacgcgtgccgtgcagacaggaaatgtgtaat

SEQ ID NO: 196 - DNA, 118 bp, Escherichia coli
  marker
ggcgttggtgtaaagattattgccctcaccctgtacgggtgagggcgtagagagattaatgcgcttttacggctttggcggttttctctttaaacagatagccgatacctaacacgat

SEQ ID NO: 197 - DNA, 117 bp, Escherichia coli
  marker
ctctgtaatcagtgtttatgttcggcggttaattgattaaataaagtgtcgagttttggatcgccaatatagttattaatcaatatcagtggtttatccgtcacacgtttcacgcgc

SEQ ID NO: 198 - DNA, 117 bp, Escherichia coli
  marker
aattcttgcctccagggcgcggtagccgctgcgccctgtcaatttcccttccttattagccgcttacggaatgttcttaaaacattcacttttgcttatgttttcgctgatatcccg

SEQ ID NO: 199 - DNA, 115 bp, Escherichia coli
  marker
ttcgccgggattgttaggatcatcaatctgaatcaccgaaatgggttgggctttagtcttcccactggcaacttccttttgtgcgatatcgtttaaaggatactgcacgagggta

SEQ ID NO: 200 - DNA, 115 bp, Escherichia coli
  marker
caggaaaccagtgttgcagacgaagcgccagaagtgacggcaacggtgatttcttatgacaactacgtcaccatccttgatgaagaaacactgaaagcgtggattgcgaagctgg

SEQ ID NO: 201 - DNA, 113 bp, Escherichia coli
  marker
tagcgaaccagacctgccgttgtggctgtcaacgcatctggcagatattcaggcagtaacgcccgataaaacggtacggataaaaacgctcgtgcaaggccattatgcggcgt

SEQ ID NO: 202 - DNA, 112 bp, Escherichia coli
  marker
ggaacgcccaacgttaccgatccctgatttgctcacgaccgatgcccgtaatcgcattcagttaactattggcgcaggtcagtccacctttggcgggaaaactgcaactacc

SEQ ID NO: 203 - DNA, 112 bp, Escherichia coli
  marker
cgtgtcggtcatttcgacatgtgcctgtccttgccagttgtggcggaatgcgtcggcatctatgtcagcaccggagaaatcaccagccagtgacatttttccggtcaacgaa

SEQ ID NO: 204 - DNA, 111 bp, Escherichia coli
  marker
tacctgttatgcaagcagggttaaaagaggtcatgaggactcacttccctgaatatgaaataatatccagcgcctctgcggaggaccttaccttattacaattacgtcgtt

SEQ ID NO: 205 - DNA, 111 bp, Escherichia coli
  marker
gcatatcaccagcgactgactgagttgctgcaatccggcgaaggtaactaccgcgaccgcatactggcttattaccagcaaacactgaaccagttttgccaacatggaacc

SEQ ID NO: 206 - DNA, 109 bp, Escherichia coli
  marker
cgataacctttcgcaagcagcgttggtcagtcatattcagcacatcaataaactcaagaccacgttcgagcatatcgtcacggttgaatcagaactccccaccgcggca

SEQ ID NO: 207 - DNA, 109 bp, Escherichia coli
  marker
gtcgcaatcaggtctgccgttggataccagcgcattacaggcgcagcttcgtgaaacattgccaccacatatggtaccggtggttctgctgcaacttccacagttacca

SEQ ID NO: 208 - DNA, 107 bp, Escherichia coli
  marker
cacgcggcgggcaaatatccgaacgccaggagcgaagataaagcatagtaaaaagcctcgcattcgacgaggctttatagcgagattgaagcgtattcacacttcag

SEQ ID NO: 209 - DNA, 107 bp, Escherichia coli
  marker
tacattactccctgatgtgatgcccggtcgctccggctaccgggcctgaacaagcaagagtggttagccggataagcaatgttatccggctatattgcaggagcgat

SEQ ID NO: 210 - DNA, 106 bp, Escherichia coli
  marker
taaatttaccggtggcattagccagcttgatgacgcggcagagcaaaaatgtattctggaatcaatccagcaactcaaagttaaaacgtcgtcccccgaccttgct

SEQ ID NO: 211 - DNA, 105 bp, Escherichia coli
  marker
tgccattcaacggttgaaaccagcctgctactgtcggggaatagagcgacattaattgttgaggatgatggcccagggattgccccagaaaaccgcgaacatatc

SEQ ID NO: 212 - DNA, 104 bp, Escherichia coli
  marker
gcggaagaccggggccaaagttatcccagacatccagttgtagattttcgccctcaacgtgggcatcgataccaatttcggcctgcgcacccgcatatttcacc

SEQ ID NO: 213 - DNA, 103 bp, Escherichia coli
  marker
atttcagaccattaagaaaattttatccaaagccagtccagcggactggcttttgcggttttagcgaataataaattgcgttactttgtcattctttcacaac

SEQ ID NO: 214 - DNA, 103 bp, Escherichia coli
  marker
cattgccgggaaagaaaatccgtggattaaaagcggtcagagcgtcatcttcaacgaatcggttgatcatggtcccttcccgcttgcccagcttaaaaaactg

SEQ ID NO: 215 - DNA, 102 bp, Escherichia coli
  marker
tggggttcgcagttgtcggagcaaggtgtagcgacagcggttattccagataaggataagaggcaatgcactaacggcgattaaccagagaataaagttcag

SEQ ID NO: 216 - DNA, 102 bp, Escherichia coli
  marker
gatgcgctgacgttcgaactgccagaaattatcgacctgcgaaccaacattgatccgcacggtactgcgcaggcattaatgcaggcggatttgcaacaagat

SEQ ID NO: 217 - DNA, 101 bp, Escherichia coli
  marker
aagcgacaacccgcaaccacgagccttcagccaaagttaactttggtcaattggccttgctggaagcgaacacacgccgcccgaattcgaactattccgtt

SEQ ID NO: 218 - DNA, 100 bp, Escherichia coli
  marker
cgatgccgacaatgacatccgtgcacaagttgaatctgcggtgcaaaaagcgggctattccctgcgcgatgaacaggccgccgacgaaccacaagcatca

SEQ ID NO: 219 - DNA, 100 bp, Escherichia coli
  marker
caacaacaattgcccttccagcgtaacaggcgagaagttttgcaatccatccgccggaatcgcccatgtctcaccaggctgtaacgccgtaccgtaatta

SEQ ID NO: 220 - DNA, 100 bp, Escherichia coli
  marker
tgtcggtaggccaaggacattaagatgctttaacagcgccacatcttgtgcgtcgttggccgtgacgttggcctgaagtaagaccgtgtctgctaacgct

SEQ ID NO: 221 - DNA, 100 bp, Escherichia coli
  marker
ggttgtctggcttaagcattgttaatgtcctggcactaatagtgaattaaatgtgaatttcagcgacgtttgactgccgtttgagcagtcatgtgttaaa

SEQ ID NO: 222 - DNA, 4289 bp, Klebsiella pneumoniae
  marker
ttggcgatcatctcatccagataggcgtgataaaaacgcaccgcgtccgggtccggcgcgccggtttccaaatcagcgatcagtcgtgaccactgtatcgaggtacgaaatgagttgaagccggtctgtttcatcagcgccacgtcctgcggatactgatgataagtatcacacacggtctgcggccctacctgctgataaaatcgctccggctgttcggcaaaccaactgtcccagatggaacgatggcgcttattggtgaccccttccgtttgcgggccggacgccgccgccccccacaggaacccttgcggaaactgatactgctgcataacctctccttcgaaaaaaaggctgcgcccgtctggcgcagcctgaacgtactactcagcgaccacttcgatcgatttaatgaacatatagccccagtcgccggcgaagcggccgaagtcaatctgattgctcccggctttaagcgtcaccggtatccgcagctgctggccctgctcatccgtctgcgggaaggccacggtctgcggagcgcccccgttgacgacaaatgagttctgcttaccgccccatttgccgttgaaggttacattgagcaggaactgaccgctccacggcgcctgcacctgccagctgaccttatccccctcgttggcaaatgggccgaggaagccgtcctcgccaactgtcagcgcgtctttatcactcttcatcaccgtcagccgcccctcagccacgccataaacttcgccgtgataacgacagaaatccgctggcgctttccccgccgcctcgcccaccgtcacggtcacggttttgctgcttttcaacagcccatcgtccgccgtgaacgtcagcgcataggtgcctggcgccgcaaaccaggcccgggtttgagcccgatcggcatggcagaaatgcacctggccatcgccggcgtgctgccagcccaccttaacctctcgcgacggcaggccatcgtcctgccagctggccgtaagctcgacgccctggtcctgcgtggtggttagggccggttccagcgtgacaaccggtggctgattctcctcgctatgctgcacgctaatcacattggaaggggccgaacgaccactctcgtttttcgccgtcacccggtagtaatacgtgtgcccgagctgaagctgacgataatcgtcgcggaacagaaccatggtttccggattccattcgttaacgccatcggagatatcccggcccaccaccgtccacggcccggtcggtgaggcggcgcgttcgacatcgtagctgcgtcccaccgcagcgcccatccagttgatcgcgaagggcgaggtggtctcgcgcagcaaaggcgcctccggcttcggcagcggcgccatcgtctgctgcccggccatctgcgccgcggcggtgcgcaccagatcgaccaccgcctgctcctggttcgcttcgccttctttggcaaaccccggcaggtggtagctgtagtgcccggtcgactccttatgccagtagaagccgccgtcgtgacgatggccgcggaagccccagataagcccgccggcggcttgcgccccgttgacgtcgctgtgaacaatcgactgcataatggcgttcagttgatccgccggcagcaggccaaactcgccgacgagatagactttttgtccgccgacggcgcgcagatcctgcgtcacctgcccgggatggttattatcggcattggtgtaatagtgattgctgacgatatccacattggggtcggtcaacgcaaacggattaattttcttataggtgccatccacaaccagctgatgaggggcccactttttaatccacgccgcggtctgatgcaggaaatcggcgttggtatcctccagctcgttaccggtttcccaggccatgatcgccttttcatcataataggcgcggccggtgacagtatttgtccgggtgataacctggcggatcacatccagataggctttgaaggtcttgctatcggtccgataaaagtcttccgctttttcatgatagaacgccgccagctgctcgcgcccgccccaccaccaccagtggtcgataaacggcaggatcagacgcaatccctgtttatccgcttcggcaatcatgttgtcatacacccgcatggctttctcattcagccgcggcatgccgtccgccgtttccggcgccagaatatgggtctcacgcccgcaggccttatcaaattcctgctgcaccgacagcacgtagacgcgctgggctttcgccccggtttgcaccatcgcctggatccagttttgctgctcctgggccgttggccatttaaagtattgcccccagccgcgcgggtctgccctgcaggggccgcgggcgtcgtcttcaatgcggtgcagctccggcgcgtggatcccggcgaaacgaaacaccttgtcgccgtccttgagggtggcgccgtcgcgagtgataaagtgcgtaaagtgcgagcgctcggcggccagcgccccgccggcccccagcgcggacagcagccccatcagcagcaggtttttcatcggcttcatcgttctctctccttagaaccagacctcggcctgtacgccgaagttaacggtgtcggtagagccactgcgggaatacccgccggcggtgatggtattggtatcccagttgtagttaccgtctaatgcatcggagacacctttatcccacttcgcgtaggtgacgaagaagcgcagctgcggacgcgcccagaaaccggagtcaaaggtcagcgttggcgcaacggtgactttggtcaggccgcctttgcctttgccgtttacccctttgtagtttttgtcatccaggtattcgtagcccagctcgtactgcatggcaaagttgcgggtgatctgatgataagggcggataccagcgacccacatcgagcgtccccagccattttcatcttctgtccaccagcggtagtttttatctttctgccagaaagcgaaggtcgagatctccaggtcgcccatcgaggccacgctatccagcaccactcgccaggactgggtgttttccaggttggcccagccccagccgtttttacccagcgagtcacccgccgccagccctttcccgtactgcaatgcgaggcgggagtatcctccggtcagaccatagaagccgtcaaagttataaataccggtcacgccatagcccttctcggcggaagttggatggttttcgttacggttcatgtggtggccgatcagctccagatcgaagcctgtccccgcgatctttttcagccacaggttgagagaatagtcatccgggtagccctgatctcccttatccaccgggtaggctttggtttcatcggtgggtgaaaaggcgtacaccccggcgtcgaagcgggcgaagccgagatccatgttgtcgaagccgcctccggtgccgttgtactgaatgtactcccagtcgaactgatggctggaggtgttggagctgctatagcgcttaccggcccagaaggtcatctccggcgcaaaatccagattgctcaactcggcgaacccttcacgaaactgtacgtcatggccatcgtcatcctgacagttccagtcggaggtgcatttcgactggtgagtgaggttggcctgcactttcgccaccacgccgctgtccgccgtcagcgtcacggtggggatcagttcgatcttggtgtcttcttcgttgcccagtcgccacttaccgtctggcatcaggccgacggagtccgcgcggttgccatcggagttcgccaggatcccggagcggatatagccatgcagcgcaaaatcatacttcggatcggcgcaggccgggctgctggcccctgccagcgagaggagagccagaggtattgagtgtttcagctttatcattatttttttcccacgttatgtttgttaacacgaaccgataacggaggggaaatttacggatcaaaaacggaaatgtacatccacttacggaaagcgctttccataattgcctatctggttcacaaaattagctctgcggcgaatatattcgtgagactgatcacataaaatgacaagaatgccgccgggcgccggcagtggagcggaaggaggagcagatgagcaggtgccgccgggggataagccgccgacggcgagaggatcagcgttcggtttccgcgagctgacgttcgtacactttgaagaaggggcgatagagcatccaggcgttaaacattgcgaacaggctcatgcacaaatttt

SEQ ID NO: 223 - DNA, 4153 bp, Klebsiella pneumoniae
  marker
gtgcgcattatcggcctgcgcctcgggacagcgccgctggtagagggcaatcatccgctgaatcgtcattttttcccgttcgatacgcttccccatctccccgcctttcgtctatttttaagatgcatttatcatacaccttaatatccatacccgaccagactcactgcttcagatgctgaatcaactgcagggctgccccggacagaaccccgaaatggctgtaggcatagaaatcccggataaaaacgctgccctcgagctcaaacgggcgcagcaggccaagcgcttcttcgtgtcggtaaaccggggccggcatcgacgttaacagatcgctctcgcacagaaaggccttaatggccgaggatgaggcgcactcaataaccggctgcggacagggtagctgccgggcgcgaaagatatccgccaggatgttcattggcgtactagacggcggcggcatgatccacggatagtccagcatcgcctccagggtgacgtccgccgcctgatgcagcgggtggtgctgcctggcgacgatgcagatccggtcctgccagttaattttgccccgcaccacgattttctcatcatgcggtaagggaccgcagagggcgatatcgatgtcgtgcatcagcaacagcttatacagctcggagtcaatgcggtcgacgatccgcagatggatctggggatggtgctgatggaaagccgccagcttatcgatgaaatggctggtcagcagactggaaacgcagccaatccgcagaatgcctttcccggcgccacggatgagctcaatttcctcgcgcgccttttgttcggtattcagcatcgtcagcgcgtagggtaaaaaggcgctgccatattcgctcaacgccatgccgtgcttatgtcgttcgaataaggatgcgctcaggtccgcttccaggctcaatagcagtcggctcagtcccgactgggtgatccccattttctctgcggccagggtcatattgccttcgcgggcgacggtaataaatgcctgaatctgcttaaatttcattggcatgatatttactcattgaataaacggtttttgcatttcccctgcgcccttttttagcgaataaatatcgctatcaatacgctcaaaaatcaccggaacgcatacttcaaaaaggatttatttatctcaccacccacggcaaaaacacatttctgatccgaagataatttataatgagaatatatcaccatgacacagaacaatattctattaatttcaggcgctatattaccggtcatcattaccgtcatcatcggctatattagcggtaaacgaaaagactttaactggcagcaggcaggagacatcaataaaattgtgatgctctacgcattgccgctaagtattttcagcaatatggtgatgacgccgcgacacatcgtcatgaccatgggcccggtcgccgtggctatcatcctggcgctgattctcagcttcgtcattcccttactggtcgcccgctatctgtttcgacgcgacctcgccctcagtacgctgcaggcgctggccatcggctcgccggcagtcccgtttatcggcacctcagtgctggcctttttatttggcaccgtcagcgcgtcgctgatcaccgtgtccagcatcacgcaaaacgtcttccagctgccgctggtgatgatactgatgtcggtcgccaccggcgataagagccagcatatttcctttggcgcacgggtggtgaacgccattaaacaacccgtggtctggtcgccggtgatcgccctgatcatcgtgctggcggatatccatattccgcagactatctcgatgtcgctgggtctgctgggcaaagcctctggcgggctggcgctgtttgccgccgggatcgtgctctatacgcgcagcattgttatcaccaccgctaccattatcaccgttatcgcccgcaatattctggtccccggcgcctgctatctcattttattaaaaatgggcttcagcatggagcaaataaaggaagtcgtattgacgatggctatcccggtaggctccatcgcgataattattgctatgcagtataaaaccggcgagcaggaaatggcctcgacgatggcgctgagtattattgcctccatcattacgatgggcggatttattttcttaaccttttaattaccgcgattacaccgcgtgaatacggagagaatatggcctctatcacattatcggctgctgaacttttactgcatcggctacaggcgctggacgtggcgtatatttttatcaactcgggcaccgattatcctccagtcattgaagcctgggcaaaggcccgggcgaccgggcaaaaggtaccggagttagtgatctgcccgcatgaaaacgccgccatcggcatggcccatggctattacctcggcaccggcaaggtgcaggcggtgatggttcacaccaacgtcgggctagccaacgccgcctgcggcgtcatcaatctggcgaacagcaatattccggtgctgatttttggcggccgcacgccgataagcgaacattcccacttcggctgccgtaatacgccgattggctacggccaggagatgcgcgaccaggcggcgctgatccgcgaatccgtgaagtgggattttgaactgcggctggccgatcagatcggcgagcatgttgaccgggcctgggcgatcgccagctccctgccgaaagggccggtctacctgagcttaccgcgtgagccactgtgcgaaacctttgccgtcgatgaggccgcgctgcaggctggcccttcgcagcagccggtccgctatgcgccagtccgggaagatatcgcccgcgcagccgaggcaatcgcctgcgccagacacccggtcatcttcgcccagcgcggcgcccgaacggcggaaggctttgcgcgcctcgatagtctggtgcgcgaatgggcgatccctctggtggaatactggggcaccgaggttaccctgagcgccgataatcccctgctcgccggggctgatcccagcgtctggctcgctgacgccgatgtgattctggtggtcgactcgcaggcaccatggatgatcgccgagggcgactgtcgccaggactgcaccgtgatccagatggggcccgatccgctcttctcccgctacccggtgcgcggctatcgcgcggacatcaacctggcgggcgagaccgatgaagtcttcagcctgctggaagaggcgctgcgcccgctgcaggccgcccgccagcagcatgtggcggagcgggcggcatatacgcagagccgcatccagcaacagaaaaaccagcgcgacgcgcttctccatgccagccagagcggggccattaccaaaccctggctcagctactgcctcggccatctggctaatcaacaccgcggccggatcgtttctgaactgaccacgctgccgcagtttgccggactgacccatgccgagagctattaccaggaagcgctggccggcggcctgggcgaagccctgcccatcgcgctggggctgcagcttgcgcgccgggaagagctgattattgccgccgtcggcgacgggtcgtaccttttcgccaaccctgcggtctgccaccatattgcggaggtaatgaagcttcctgtcctcgtcgtggtcggaaataacggcggatggggcgccgtcgcgggcggcaccaaagcgctctacccggacggctacgcggcccgcgcggaaaccattccggccaccgcctttaccacctcgccggatttcgccgcgatcgccgcctccagccgcgcggcggccctgtcggtttcccgggccgaagatctccccggcgtgctggaagaagcggtatccctcatacgcacccgccgacaaagcgtgctggttgacgtgcagttagcccgctaacggtttatcctccgggcgcttgtcgtccggagggggttgtcaccccttctggtcacctttatccacatggcccagcggcttctccgggaagcagacatcgcgcacccggcgtttcagctcggccgcatccggaaaaccgccatcctgcttgcgctcccagatctgctgaccgtcgacatcgatcgtgaagatcccgccggtccccggcaccagcgtcaccgaggcgatg

SEQ ID NO: 224 - DNA, 2195 bp, Klebsiella pneumoniae
  marker
cgccagcgcgcaagggagaagtacagcaaaaagtttgtagcgcatgatgatttccttataagcgaactacgttttcagtttccgttaaagcatagcgtatagcgtgcggattgtacttgacgcaaagagctaagaccttgatgtggctacagccttagggcgggaaatcggcaacggggatgacagaattccgatcaggcgctaaaaggcaggagcagtataaaaataaacttaattttcccgtgaacaagaaatattaccccataaaatagggaaatggctcttgaaagataagggtaattatttcttcttatagatgcgagtggcgacgtgcaatttttttatccgtattaccggaggacgggacaatgacgccaaccccttgttcatttagtttttttaatcagctcttcacgggcatcgttggatgcggtttgaccagtagaggaaatggcgccgattttggtatattgcgtatggactttatcaaaagcatgttttgttaaaatttctgcggagacggcattggccgcttaaaacaatgctgtacctgccactaaagctgcatatttaatattcttagcccctattgtttatctcgctatcatcatgctcttgtttgcattcaccaatgaatgaattcagattgaactcacactgctttttgtaaaagcaaaatgctgcaatttaatgacggttagttaacgcatttttagcgaaaagatgacgtatttcgcagtgctgatgcttgattttttgagccggttacccatcgggagcggaccaggctattttcttcggtcgttagctgaaaatcaccctgagaggccggagctgaggggaatagggcgctgacagacattcccggtaacatggtttatcatatagaaaagcaggggctgcgcccatggtcatgcaggtcaccagggagttaagatgttaacaaataagcgagagcgcgcccggcagcagcgagccgcgttgtgggccaccagagataatgtccagcgccatgcgctgtccatgagtatgccctggctcgcctttgtcaatatcgcttttgcgttaatgattttcttccgcaattttatctttacctattttgataagaggctactgacgcatcgggcggttattccttatatcgaagcggcgttgattgcggttattatcatttcggccattttagtgattattgccgtcacgccgcgactggcgcagggacgatatacgttgaatatcatcaccgggctgctgctggtgctcagtctgtgctggtccctgagtaattattgttttatttttttctggaccttgccctttgcctggccgctgctggtgatattaatgactaccggcctcaccgcgctgtatcaccattggcccggcattaccgcttttatgctgccgctatgggtgaccgccttgctggcgggaatacagctccactatcacaccgagatccgctttttgatcctctgggccatttttatcgcgattttgctgtatggccgacgtattttgcagcgctggtatgacgaggcctgggatacccaccaggagaatatgcagcttattcagcggctggaaagtatcgccaaccaggatgccttaaccggaaccgctaaccgtcgggcgctcaatgcttacctggcggcgatctggcagcaaaaaacgccgctggcgctgatgatgatcgatgtcgattattttaagcgctataacgatcgctatggccatcaggctggtgatgaatgcttatcttctgtcgcgcaggtgcttaaaatggcggtccgggctgagggcgatctggtggctcgctacggcggcgaagagtttgtcgtcgtgttgcccggggtgtccttagcgcatgccaccgctattgccgagcgcattcagcagaagatccgcgaggcaggcctaccgcacgccgcttcggcggtggcgtcggaggtcaccgtgagtatcgggatcgtcgcctccgatggcacggtcccgatagagacgctgatcgcccgggcggacagtgcgctgtatcaggcgaaaaataatggacgtaatcaatggtcttattaacccggagacgctgccgggcaagggagaagggatgaaacggatgatgcggatcgtgctgctggcgctgctgctaaccggctgcgctggggaaaagggcattatcgatcgcgacggatacc

SEQ ID NO: 225 - DNA, 1796 bp, Klebsiella pneumoniae
  marker
cggtctctttcccgtcgccgcagtcattgatatggatacgcagcgtgcggcccccctcgtcgacattgaggaatcggctggtggcggcttcagtttgcggttgatagctcatgttagtctcccggttaatcaaatctcggtggtggcgctcagcgagccgaatccggcgatccactcggggatcggccggtaatagcggccttcactgcgccagcggccaaaagcggatagcgcggcaaaagcggccacccaggtcttaatttcgtgcgtcgatttcccggccatcgccgacagctcgtcattgccgatcgcgtccagttcgctcagccgcccctgctccagcaggctcataaagcggttgtcccagaccgggttgaggggatggagcgagtgcgggtcttcggtaaaccgtcgggcggcattgatcacccgctgctggcgccgttcgcgttcgtccggcggcagctgttttccgccgccgagcaggcgatcgcgcagatgggcgtcggccttcgccagctccggcaccggcggctggtgcgagagtccgcccgagccgaggatcagcacccgcttattgagggtattgagaaagcggcccatcgcctcgcccagcagccgggtgcgttgaaaacccggcagcggcgcggcgacgccgttaataaacaccggcagcaccggcacgcggtccaggccacccagcagaaactccagcggctgggcgaagccatggtccacctgcatgttgtacgacaccgccaggtcgataccgctgttgaggatggcgtgggcgcaggcttccgccagctcggcgggcaccggcaggtcgccggcggcgctggcgaagtcgccaatcgcggtggcgccgaccccgaggcagaacggcggcatcacgtcatagaaaaaaccgttgtagtgatcgggggcgaagagcaccaccagctctggatcgaattcagcgatccgccgccgggcgtcggcaatcaccccgttcacttcatcgaggaccgcctgctccgggtccacgaatcccaccagcggggtgtgggagagacagtgcaaataggcatgcatatcaggccaccttctcttcagcgtgggcggtatccccggttgcgagggccattttttccgccagggcggtcagctgcgcgccgagggtctgcgggatggcgagagcggcgacaaagcggtccggtctgaccacggcgatggcggtgttatgctgagcaaaccagctcttcaggcgattttgcctgtcgcccacccgcagcgtgccgggggcgttatcctgctcgcggtggatctgcacctccggcaccacctggataaagcgcacgccaatcgcgcgccagcgggcgatctgcccggcgtcgagcccccactgcgggttgcagccccagccgataatggcgaaattcgccccgataacctcgtcgagcagcacgctctcgccgctctccagcgtcacctgcggttgaataaacattttgcccaccggcgaggtcttgccggcgccgtcggtcagcagcgccccctcgcggtactgcggcatcggcttaaagcgcatctcgaggaagtagcgtttcaccggcggcaggtaatttagcagccaggagagaccgtcgcgcacggccccctgccagcgcttcggcggcgccagcacgtagccggcggtgaccgacagatcaatcatcgctttcgcgtggtcgcggcgctcctgctggtagctgtcgagcagcgtctctcccgctttaccgttgaccaccagcgccagcttccacgccaggttgaag

SEQ ID NO: 226 - DNA, 1658 bp, Klebsiella pneumoniae
  marker
ctctgctaatgccgaagcggaactggccagaaggcctactaacaggatgattttacagtgcttcatagtatgccctcagagatcgaaataaaattttcaatacaactacaaacggtatatttaaatcattttcagactacgaagggcgttcggttcttgcaatattgatgtaaagaaaatgttgccatgcgcacactttatttcaccgcctcactcaccgagggctcaccggttgcggggagcgcagcggtcggcgacgccggctgttttcgcttcagcagggcatactccactatcagctgttgcagatgcagctccgcgaggcttccccgcgcggctggccagggttgatcaacgggaagcgcggccagctggcgcagctgctcctccagcggaacagcgcggttaaacgactgcgtgatggcaaatactgcggttttcagttcgctcaccgtcaggtacttccccttctgctcgtcgagggcattgagctggtcggcgagccgctgcagttgctgcatgccctccgaccagccggtaaggttttccgcgggcaatgcgccagcactcagctgctgccgccactgctgcgccagcggttgcgcctgatccggccagcggatcagggcctggtggaccagctggtcgccgtagctgaccgcccagtccggcgccaggcgggcaagctcgccaagctggcgctgcgtctgtggcagatcaaccggccccgggggcgttgtcgccggcaggcccggtatcggtccggcattttgggtgaccgaaatgggcggcaagtcggactgacgcagcgccagccatccgccgacggcgatacccgttaccgccagcatggtaaccatcccggcgataaacggcttccagcgcggcgcggctgccggagtagacgccgccaccggcgcgggccgctttgcaggtgaaggcggagccagcggctcagcctttggtctacgttttaggtctggcactggctcaaccttcgccgcatcctcttcgctgaccagagtgccgggaagttccgcgtcagacaccgccaccggcggcgcggtgggaagcgctggcgcagggtcgaggctctcgaagcgagttgccgtgctgtgcagtagcgcccgcaggtcgctcagctggttttcaggagcgatctcaaggcgctggagcactgcgtcgaagctttgcagcgaacgttcagcctgctcaagcgaatcaacatcctctggggtaagattcagggtacggatcacctgccgcagccgcttgctcagggtgcggaagatctctgtccgggccgggagcgcctgtggccacaggtttttcccctgacgaaccagcagcgactccatcagcgtcagcccctcattgatccctgccaccccgcccagccgggcgcgggccagggtataccaggcgacagtctgcaggtccgcgccgtgatgctccaacagcccgcgggcaagctgctcggcatacggccagttaatatccggccgcgccgggtggctgagcttgttcatttccgcacgcagggccataaaatcagccagcgtgcgcgggtcgccaccggctttatagtgacggtcgtggtgtgttgtcatcatgatgtctttcagcgagagattagagggcggagcgggcgtcaaggt

SEQ ID NO: 227 - DNA, 1550 bp, Klebsiella pneumoniae
  marker
ggggtgagctcatggtcgattcctccatttatcctgcgacgattataggcaacctcgtcgtccggcgttgggaaaatcgtcacgcgccgcgcacgctgtaccgtgagggtctcaggcgcagtggcgctggatgagcgcgatgctctgctcaatttcgcgctcgatatccgcttcgctccattgcgccagctcgggggcgaagggctcaaaagcgtacaccccctgatagccgcgggcttccagcgctttaacctgctcgcaggtgccgagacgatcctgcggggttagcatgatgcgctcggcatcggtgagctgctcgcgcggacggctatcgtccactcctgaaaggtgcaccagcccgatatccgccacctccacctggctgaactcgtccgccgcctgcgggtaaagatggtgatggaaggtgtcgatcagcagcttaaacggcacgcgggcgtcgtggatcagcgtctgcgcctgatgtgcagaacgcagcgagctttgcgggaagcccagcggctccaccaggccgtggatgccatagaaggcgaacagcggcgccaggtcgcgcagggcgcccagggtttcgctggccggcacctcgctgccgtcgttgagcggacagagcaccagcgatttggcgccgatggcctgggcctctttcagcagcgattcggtcaactgccgcacctcttcgctacgacggttaaaggggtagaccgcgttaatcgtcaggatctcgatgtggtagcgcgccgccagctcgcgcacctgctgatggctcagatcgtcggtcacttttccactgggtaaatcgttgcgcagctcgaccttattcaggcccagacggttcaccagacggaaaaacgcttcaatgctgagcgctggcgcgattttgcggttaatacaaaaacgttgcattgcgatggccataggacactcctgacggaagaaggggtaggttcgttcaattggctaacagtcaaaacgtttattccaaaattagcaagaatggaaatgatgaatgtttgagctgtctcgcaaaatatcaccggcaccgactaccggcgcgacagcggcgggaagcctggcgtcgagaggcaacgaggcgcgatgcgggaagcgcacaggcgaccggttagcgcaaaatgcgactgttatcaccaaaatgaaatttcatttcacaacaatgttgaaatataaatttcattttactacggttatagcacagcagaatcagcgacgggccggtgtgcgctggcccccttcactatgaggcgagaacatgacgatcacaggaaactttattggcgggaaaaccgttatcagcagcagcaacgaaacgatgccggtgtatgacccggcgacgggcaaagcggtgcgcgaagtcacggtgtcaaccgcgcaggaagtctccgaggcgattcaggttgctcgcgatgcgtttgacagctggtcccgtaccacgccgctgcgccgcgcccgcgtgctgttcaacttcaaaatgttgctggagcagcacgtggaagagctggcggggatcatcgtca

SEQ ID NO: 228 - DNA, 1535 bp, Klebsiella pneumoniae
  marker
atgacacaattgtcatacaattttaccggggcatagcaggatcatctataccatcagcaggcttatccttgtgttgtcagaggatgtttaacggtgggttacagcactgttatcatcagcgattgacggcgttgctgcgggcgatcgcctgtgcgccactcaaatggcaacccacctcgcaccgctgagccacatggcccgcttaatatcgcgaaaaaacggatctttggcgtaatttattccgaatagaaaaaatatattcctcttgataaaagcgcctgcaacaaaaaataaaaataatgatcatcaacctgaaacattactaatgaaataacttattccgttctcttctacgacgaatctcgtagtcaaatacttatatcttataaccaatctgaaaccagcgagcccctgccaacggcgcacaatctcagccctggtagtttgcacaaataatggtgtaacaaaacgtaaattaccgcgcttgagagttttcttaatttcgttgagcgagtattcttaaatcgtcggcaaatggaaaaaatacccgactcatacggaatgtgtagagttttattattctgcaacagtgccgcgtgtcactattttatcttgtagttatccgcaggatccgctgacgcgcaccagtaaccccttcccggttaataaggataattttttatggcagttccaggaatggcacaaaagctaaacacccaaatgaatcttgagtttcacgcctctaacgtttacctgaacttaagcgagtggtgcgcccggcatcgcttcgacggcgccgcgacgtttctgcgcacccgcgcgcaaagcagcatcaccctcaccatgcgcgtatttgactacctgaaaaaagccggcagctggccgatcgtcaatcccgaccacgcctgtaaccctgagtgcacctcgctggaagatctgtttacccaaaccctgagcgattaccaacagcgcagtcgtctgctgagcggtctcgctcaggaagccaaagcgcaaagcgatgacagcacctggcggtttctcacgctgttggcggaagagcagcagcaggatggcctgctattgcaaagcgtgcttgaggaaattcgtaatgccgataaagccggtctcgggatggagcagaccgatcggcgtctgatggctatcgttggagaagcgcagaaagcgcattaatcaagcctttatcgctctgccagggggagcgcgtctgcgctgccccgcccggtattattaatccattacgtctattttttctcccctattattcctttcaagaataaaaaagttttaactcgatcccattccctcatcaccgttaccccataagggggattagtgagcgcggtcactttttgacgaaccataaagaaatataaaaacagtgtttcaaaaatataaaacacgaggtttaattttttatggctagatacacggcttcagcctctgaagggctgcagggaagaccgatcttgttacgccatcagttagcctacggcggcggaaatctgttagggagc

SEQ ID NO: 229 - DNA, 1410 bp, Klebsiella pneumoniae
  marker
aacagccacagcgccagagtcggtcatcacgccgcgggccgcgccggtcagctcaggagaggtttcatgtgcaataagcaaatcgtaatcagggttgtaatagaattcgccgcttgcattaatccccagctcctgcagagccatttttactgattcaatttgttgtgacatggaactcctgacaaactatttaaggtaagaggcctgggttattcattgctttcgtcatcgtcgccggctatttaataagataagtcctggacaatgaaataaagcaataaataaccgtgagtcgcgatttcatatcgtgctcatgtagggtcgccgatatgcattcataaatctcaactttccaaaaaatgttaacacctgtcgataattatgttaattgcatagtttctatgcgctatgctaaaattgcatagcctttattgcgtttttgaggactggatcggtgttggcaaatctggaagtaaaatggctgtatgatgtgattgccctcgaggagtcgcgcagctttaccctggcggccaaagcccgcaacatctctcagtcctcgttcagtcgacgcatccagtcgctggaggcttccctcggattcagcatcttcgatcgtagcgccaaccctctgcagctgaccaaccgcgggaaaatttttgtcggctatgcgcgaaatatgctcgatgacatggattttcagatcagccgtattaagggtttaaataacactacccagaaaataagaatcgacgccgccccttcgctgtcggtgttattactgccggagatcatcgccggttacaccgaccgtaaaaataagacttttcatgttgaatcgattaacgtcaacgacgccgtatttaacctgaaagagggaaaaagcgattttatcctctccttctataatgaagaattaatgaactatccgtttattaatcataaaatttttgattcttacctgcacctggtctctccctgcgacgaacatggccgcccgctgtttcatttacatcgcggcgtgctgccgctgatgaaatacgccaacgacagctatatggggcgccaggtgaaccaggtgatcgatcgcacgccggagatcaccttctcccttacgtttgtctcttccatgagcgagctgctcaagcgcatgatcctcaatggcgacggcgtgggctggctgccgcagtactccattcagcgcgagctggacgaaggccggctgacgatcctcgatgagagcctgtcgctgccgatcggcgcctggctctaccgctccggctcgcggcttaaccaggccgccgaacgtttctggcagcacattaaaacccgtaacgaaccgcgggaataaccccctcagccgctgatccccagatatgccttacgcacctccgggtcgttgagcagcgtctg

SEQ ID NO: 230 - DNA, 1324 bp, Klebsiella pneumoniae
  marker
agcgccagccagaatatcctgctggatgagccctgctcggcgctggaccttggtaaccagcaggtggtattgcagctgatcggcgacctcgcccaccgccaggcgcgcaccgtcctgttcaccacccatgatcccaaccacgccctacaggtggccagccatacgctgcttctgctgccggagggccggtggctggcgggcgagaccgccgacgtgctgagcgaaacgcatctccggcaagcgtacggcctgccggtacgcctgatccgccatgccgcctccgcgttccctctgctggcgccggggtttacgctgcgtcgctgaacggcataaaacccgcctgccggagatacccctggccaacgtcgccgaggataaagcgatacagggccagcgcggcgggatcggccctgagacgcgccagctggtaatcgcagcgaatattccacggcgccgggatggtcagggtacgcagatcgtcgcaggcggccagcgcggggccatagtgcgcatagccgataaacagatccgccagattctggcgaataagccacgcgccggctatctctcccggcggcacgctcagtgagtctctgccgccgaccagctgctgcgcccgcccggccatcgcgttgcccaaccctggatagcgtgcctcaattcgggcgaacagctgccaggtataatctcccgacggatcgcagcctggcgtggaggtcgccaaccgcaggcggggcgtgctgagcagcgccagccagtccaggccatcgttgtccggcgaccgccgggcggtcagcatcagctggttgctggcaaatccctggcattcctgcgccagacccgcctgcagcagcgcctgcgggtgcgccgcgttggcggaagcaaaaaccgcgcacggcgacccggcttcgatccgctcgcgcagcaggccggcagggccaaactgcgcatcgaccgccaggccagtgtgctgccgaaagtgcgccaccagcggcaggaaggcgcttctcaggcttcccgccgccagcagcgtgagagtggtatttgccataggatatcgctataaaccggataatatagcgctatattacccggtttgccgtcgcgtcagtagcgaatttctgccagcgcacgcagctgctcgggggtggctaccggtaggtcaaaaaagcgcagataggcagggatcatttcaaacagcatgtcggtcccgcgctggatgtggcactgtcgtgcctgagcggccctcagcagcggggtgtactcctgagtcatgacgacttcccccacccaggcgcctggcgccagacggtcaacgtccagc

SEQ ID NO: 231 - DNA, 1313 bp, Klebsiella pneumoniae
  marker
aagggtaaataccctttcgcactgggcgcaatgcgcgctactgcctttgacatctaacggcgcgtggcacagagggcaatcaagttccataaccattcctttcaacgtttatctgcacctattttatcatgttccgggtttaatgcgggccgcgtaattgctgctgcaacctgagcagccattccacttcctcaagcctacgctgcgttagcccggccacgctgtccggcgcccggataaacagattatcagcgccgaggatctgctcatcaagacagtgcgtatagatcgccccgggccgggtccagcgctgcacccgctcgccgtcctgtagcgtcaccacttcgccctcaggggcgcgatcgagggtgattattcgcccgtcccgcagtcctattcgcattcccttttgcccgcccgcgggacccgcgtatttgttgagccagatattgagcgggatagtgcccagggttccctgcagatgcgcctccccctcggcagtgctcgtatccccaggagcaatgtcatggccgaggcggtctttcgccacccgaagggaaaggctcagcgccgtatcgcctccgctggcgtgcagggtttcgcggagcatcgccaggacatgggtgccgatatcgaggatcaccccatcagggtgacgcagctgccgggtatccagctccccggtggcaaaattgagtgcgaccggctcaccagcgctgttaaagccgcttggctcctgcaaataaccttcgatccagacgatatcctgcgctgacaggtgcggcggaggcaggccgctggcctccccttccgcccgccacagcgggccaggagcgttcagcgcaacgcctcgcgccatccagtggtcaagagccagcacccgcgcggcctgctcagtcggcgccagcagcgcccgcagccgggcggcctgctcaaggttggccacgatcggcttttccaccacgatgcgggaaatgccgctggctaacgccctctccagtacgggcagatgctgaagtgatgaggtggtaatgaagagcgtatccaggggttcggccagcagcgccgacagcgaactacagcgctggatccccggcagcgctctgctgcagtccaggtcatagccctggcagcggtcgatgacgtcccccaggcgacgcagcgccggtaaataggcggtttccaccaccgcgccgaggccgataaaaccaatctgcatagtaagtccacctttgagccgctctgttcccggcgaagtatcgcgggattatggcggaaggttttgacatttaccggcatggcggccacaaaaa

SEQ ID NO: 232 - DNA, 1244 bp, Klebsiella pneumoniae
  marker
ccgtttcgctgacagtattcaggtcaagcccgccggcgaaattgccgtacaggatgtcatacagggagggacgaggcattttcacttctccttaaacgggtgcagcgtcagttgattttggctggcttcgataatgcgcggcctcgccggatcaagttcgtcccgggtgagtaccagccgccagctgttttgcgtcaggtctggatcgataaacatggccgccaccgccacaaactgcgcgctggtttccatgggcatatcgacggtcaccgattcgcccggacgcaggcgaacatctttttccgccacccggtccgcctgcagcgcctggccatcgccggcaaacagcgacgggtagtcagtattgtcgaacgcttgccggtccttcagctgataaatacgcaccaccgtcgccagggaggcgcctttggcgttgttattcacgccttcccgggcgcgaagatccagatgcagggttttcacctgggggtaaaaaatggactgggtcacggaaacggcgccgtctttcacggtctgcgtcaggccgcagccggttaagacggtaaccatgaggaatgccagcaacctggcggagggtttaactgcggtaatcgccatcttcatcgctctccctgcggtggatattttcccggacgcgctgatagcgccccagataaatcgtgactctgtcgtcagcctgtttctgcgcatccagaggacgcagcacagcggtacggccgagctggacggcatgctcctgctggcagcaaagttgcgcatccggcagtaaatggcgggcgacgcaaagctgcagccgcacgtcaagatgagatccgagccagacgtgcagaagcgccatcaggtcgctgaacagttcgccgccgggcagccagccgcgaacctcatcaggcttttccgtggccagctgcagcaatacctgaccgttcacatccgtggcgtgggttcccatcactggcctatgttgcaggctaaccggctgacggacgctcatcgttaacggctgcgacaaggggatccggcagggatcgtggtggtacaccgtcgcccgggtccccggggccaggagcgccaccagcgcctccatgccttccccggatctccccggcagcatcatcaccggcagcagcgccagaaatcgcgacagcggcgctaaaaaaaaagcggcaacggcggcacatcccggtatgcccagccccgccaggcccagcagatactgcgagatg

SEQ ID NO: 233 - DNA, 1167 bp, Klebsiella pneumoniae
  marker
tcgatgcgaaagcgctcggcaaggcgggcgttatgcgtatagacccgctggcggatcagctcgacgcggtccgggtccggcagcactttgctcagcagacggcgcatattgtgcggctcgctgagctgggcttcggtttctccgggcatcaccataaattcaaagcggcgcacgccgtggggcagcgcggcggaaacgtagggtcgcaccgggtcgcagcacaggtaaacgtgcggggtggccagcgggtcgttagcgatatcgatgacgatccactgattcggcgcggttttaccttcgaaggggatgttcagcgtacggcgaataaagctggcgccgccgtcgcaggccaccagccagtccgcgcgcaccgtctcccgctcgccgtccggtcctttaagatttaacgtgacaccgtcaccggtctggctaaaggcttccacttcgcgggagaagaggcagcggacctgcgggaaacgctgcagaccgtgatacatcaccgcatcgacctgcggctgaatgaaggcgttgcgccgcgaccagccaaactcatcggtcatcggctggatatcggcaaagcagcggccttttggggtgagaaaacgcatggcgtgccacggcgtggtatgcggcagcacgtcattcaccagccccaccgcctgcatcgcccgcagggattcatcgtcaatgccgatggcccgcgggtaatcgatcagtgtggcgagcttttccaccaccagcacgctgatgcccatctggccaaggtagttggccatcatcagaccaaccggaccggcgccaacgatggcgacctgagcggtatgctgcacggcgggttgaatatcgggtgtagatgttgtcattctcagcgacctcacgactcggaaactgcccggctgacaggcaatttgttaatcatgtgtaaacgatatttttataatgggctgagtatagggcgggggttttcggctacaatcaaaacatcatcgaatgtgcaccaggtgcaccacactgtttttaaagcattttaatggaggatttatgcgtgacgatgagtccgcagcgtacaaaacggtgcgcggattaagccggggtttattgttattaaaattgttaaataaattcgacggcggcgcgacgccgggcctgctggcggagtttagcggc

SEQ ID NO: 234 - DNA, 1084 bp, Klebsiella pneumoniae
  marker
ttcggaggcggtggatggcgccggcgccggagctaccaccgtcttcggggtgattatcggtaccggctgcggcggcgggatcgccgttcatcaacagctgctcagcggccccaacgctatcgccggggagtgggggcataatccgctgccgggctatactcctgagcgcgatggcccgccgcagccctgctactgcggcaaaacgaactgcatcgaaagctttctctccggtaccggcttcgcccgccgctatggggaacaagcccgtgcggaagccattgtcgccgcggcgcaaaacggcgatccgcgcgcgctggcccactggcgacactttatcgatgcctttgcccgtagcctggcgtcggtgatcaatattctcgacccgcaggtgattgtgctgggcggcggtctgtccaacgtcagccagatctatcgcgatctgcctgccgccatcgtgccgtggatcttctccgacacctgccgcacgcagatcaaaccggcccgtttcggcgacgccagcggcgtgcgcggcgcggcttggctgccccggcttcccggcgccgcgcaagggccgcggtagacacttttttcagcaggtatgttaagctaggcgaaaatgttcagacagaaaaagccatgccaacgattgatgatgtttcaagattagcgaatgtctcaagagcgacggtatcccgcgtgctgaccggcacccggggcgtgcgcgaagagagccgggaagctgtgctgcgggccgttgaagaactcaactatcgcccgagctttgccgcgcaaaacctcgccagtcagacatccagccacgttggtctggtgatttccgcgcaggacgaaagccacggcgcacgtctgctgccgctgctctctcaggcgctgaaagtgctgaataaaagcctgctggtccagtacgtcagcgacccggtagagcaggcggcggtaatcgacgatctgcagcgccagtgcgtggcggtggtggtgctgggcgccgttgccgccgacgcgccgcgcaacgttatcgcctttgaccgcttcggcgtcgccgggagcaacagccagggctatgacttcg

SEQ ID NO: 235 - DNA, 1031 bp, Klebsiella pneumoniae
  marker
gtaagttacagataaataaagagataagtaccgccatcagcgtgtcggacgccagcaccagcggccgcaccgcttcgctgatcaactccggtacgatgcgtccggtggtctgcagcagtatggcattcatcacgcttatcgacagcatcaccaccagcagcgggatcagcagttgaaagccattgcgggtcatcagcggcacttcatcaggcaagcgaatacaccagccttttttgtaagaaaaagcgaataatctcaatggaataggtgctggatatcagagcggtaaatatccccataccgccgagataaacattgctcaccgcagtctcgcgaaagccgataaacagcagaaaagccagacacccggttaaaccgcacagccgttccggcaggcggtactgtttggcgaggctggcgctggcgccgaaggcgacaatcagcgccaccagtccaatggtcagctgaaaggtcggcagcaggataggccgcagcagcaaatagacctggccgaaacgcgaggcgccgtcgatggaaacgggcggaaacaaaatgggaactaacaggctgccaacgatcacaaagggcatagccagcgcaaagctatcgcgcatcgccgtaatgtggttgttgcgcgtcagaacattcgccagcggcgccagccgctgctcgatgatgtccacggccacattcattaactgaatgttcatactcctacctttgcgaatggttgtctcgccgggatgatcgcccacaacaccggaaagtgaaagcctgccataggtgatcatggtcacaattaataaatccacaaacggaaagcgctttccgtaatgaatccattttgactatagtccgctcatccaacctcatcaggagcggtaattatgaaaaaaattatgttgtgttgttcagcaggcatgtccaccagcctgctgatgaaaaaaatgattgcggaagccgaacagcggggcctgccggtagagatcaacgcctatggcgtagcggagttcgccgaacaggtcggccat

SEQ ID NO: 236 - DNA, 1029 bp, Klebsiella pneumoniae
  marker
cgcgggtttgctccggtttgtccgagccgccggcccaggcggcctgcatcacgcccggcagcagcatcgcgccgcccagcgcggcccctgcctgcagcaagcgccgccgggaaattgaaaatttgtcgcccatatccgctccaccatgcgcaaaaaaaaaagcgcccgacagtgcatacgcactgcaggacgcctttatccacggacacccgaaccgccattggttcgttgcccggacttttattcacttaataagtaatgcaaacgggatgccagctttggcaatagcgcgctggcgggctttttcccaacgctggccggatttttcacctaaaagtgcaccgccggcaggcaaagaatgcccatcgattgtgcatctactcctttggtgttagcggccaaatcgccttcaccatcagcagcgcgcgggctatctcaaccatgcgctgatttttgtccatggccatcttgcgcagcgtctgccaggcctgctcctcctgcattccctggtgcgtcatcagcagacttttcgctttttcgatcagcttgcgctcttcgagcgcgtctttcagcgaggccagctggctggagagctgctgcagctcataggcctgctggcgcaccagcggcagtagctgtttatcgagccgtggcgtcacgctatcgtcttcctctccggcctgccagccaggcgcgtcgtctgctaacagcgcgtcggtggcatccagcagatcgtcgatcagttgctcttccacttcgcgcagttgctcaagccgttgggtttgcaggccaaaccagcgcagcgccgtttccccgccgtcggcagccggctggcgggtacaggcgatccgccgcagctgttcaatatccagaccggcgtggcactgggttctgaacaactggacggtcgccgggctgcccagcgcctgaaagctgtcgaagcagggctgctgaccgtcaatacggtccaccagctgctggcgcaggctgtcgctgaactcgccgcgggtaaagcccaatgctcccagc

SEQ ID NO: 237 - DNA, 919 bp, Klebsiella pneumoniae
  marker
cgaactggtgtaacctcgcgcgctccccctttccgcgccggtgagagggagcgctggcgcagcgcgctatttatcgctggtaaaaccgttgctggtcgccagttcggcaaaccacagcgcattgcgttttatctgtcgctcgccggtctccagatccagtcgccagaagccgtagcgccgtttgaaggcattgatccacgaccagttgtcgataaacgtccactggtgcacgccaaagcagttcgcgccgtcggctatcgcccgatgcagctgcaccagatgctcctccatcagctggatgcggaaagtatcgtctatcaccccgtccgccccgggctcgccctctgattgtcgatccatcgcgatgccgatttccgcgagataccacttaatattgccgtagttatcgcgaatattggcggcaatgtcatagatcgcctgcggcaggatctcgttgttatcacgataaggattaaagcggccctgcgggttcaccgcgttttcgaaatagtattccggggtgaaataatcgaggtcatattcgctctcacgcgcttttacccgccgcggcacataatagtttaccccaagaaaatcgatatccgcgctgaggatcaacgccgcgtcgtctttgctggtcgtcggcaggcagtcgtgggcggcaaggatctcgcacagcgctttggggaattcatgttttaccagcgggtcaaggaagctgcggttaaaaaacaggtcggcatacccggcggcttttttatccgcgtcgctgtcggtgagggtatagctcggggtcaggttgagcaccacgccgatctcgcccgccagcgccagttcacgataagccgttaccgctttggcgtgcgccagcataatgttaaacgccacctgcgccgccagccggccatctttcttacat

SEQ ID NO: 238 - DNA, 901 bp, Klebsiella pneumoniae
  marker
atccaccaccgcgctgttggtcagagcattcatttcattgaccatatttttcatttcacgggtgatcgcttctgaccagttgagaaatacctgcccggcctcggtgagcgagacgccggtatttcgccggacgattaattcgctgccaaaataactctccatgtcgccaataattttactgaccgccggctgagtgagtcctaacgcttttgctccggccccgattgacccgctgcggatcacttcctggaaaactaccagatgctgtgttttaggcagagaaaaagtattcatcgcgtctcactttcattcctttgttgacggcggaaagtgtaacaaatcgcaattgccagggttatgtgagagctctcacaaaggctccgccgcggcggataagcaggatccacgagccagaataagtaaagtaaaatcaatatattaaaagcatcatgaacgctatttgcgcgccttttgccgtggccgaatgcggggataaaaataattgatggcgataacatcgacggcgaaatggcgataaaaaatacgccttttgtacgttattcgacccgcgctatcagggtgagaagaaagccgaaaattaaattaatgctgtaaagaataaaaagcagacgtaataaacgccattatttaacgacaagccggtcgggcatcacattttatccccggcggttggggaaaatgcacggtcattatttacaccaaagaaacattaaattcacaatttttcttttgggtcgcgataggcagcgatcttttttccgccatagcgcagttggtcatactttgattaaaatcaaccctggtaatttatcttttacgacggccattggatagtcatttgtgttgccgatcacaaatccataaaacaacgacccggcct

SEQ ID NO: 239 - DNA, 864 bp, Klebsiella pneumoniae
  marker
gagcgcctcctcggcaaccggtttaccgcaggttgaaaatctggaaaacaaaggcaaataatcgcctgacaatgattgctttccgccggcggctcaccgccggctttttattttgaatgacccaccaacgtaaaaaaaaatgccatgacgcattttttccttatcgccagaccagcaaaactgttgactataatagcctcaattgattaattcatatctggtgatacacatcatgaatattaaaccgccgatcaggccgcaaaagaccattgaccgactgatcgatgtacttgagccacacgcgacccccgttaacgcgatcgccagaaaaagactgacatgggaatataaaggcaaaacccagctctttatttttaaaaaaggcgagctgtcgattattcgtaattccgacaggctactgatggtgaccgtctatgagccgcatcttttcggcgtggcggaaatgctgcagcccagccgcagccacagcctgcgagccgaggtatcatgcgaactgctacggatcgaccacgacctggcttcggcgctttttcgtcagcataacctgtgggaagaggtgaccagcctgttggcttatcatacctcgtatatggtgtatcgtgacgatctggtcctgcagcagcgtacctattcggtcatccgtaaccatctgctggagatgatgctattaagcgaagagacccgacagcgagtatctattcttgagtatattcaggacaggacccttctgtcgcgtagcagtattctcaatgtattgtcagcattaaagaaaggcggttatattgcctttgcccgcggcggttatttacaaaatatcgtctcacttcctgaaaaattctgacc

SEQ ID NO: 240 - DNA, 863 bp, Klebsiella pneumoniae
  marker
ccggcggcggcgatgatcggtatgatggcgatcgtcggcgggatcgtgctggtgttccgcaccgcgaaggtccgcgccggctgatggcgagccgggcgctgcggcgtccggttcattttcctgtcatcttttttacgcatgctcccggcagcttattttgaccagtaagggaaagtaccatgggcaacacgctgacgatttttgatctcgataacaccctgatacagggcgatagcagtacggtctggagccagtttatggttcgcgaagggctggcgacgcagaaggggtatcttgcccgcgaggcgcggctaatggcggattatgaccggggagagatgaatatcgccgattatgtggccctgatccaggcgccgctggccggaataccgaagtcggacgttgacgcgctggtggcccgctgcgtgcgcgaggcgatcctgccccgggtctatccgcaggcgtgggagctcattcgtcgtctgcgggccgagggagagcagatgctgattatctccgcctcggttagcctgctggtgcaggcggtggccgccgcgctggagatcgatcaggcgctgggtattgacgtggcgatggtcgacggcggctacagcggtgaaatcaccgggatccccagctatcagcaggggaaggtggcgcgtctggcgcagtggcgcgaggcgcatccgcagtatgacggcgaggtgacgttctataccgattccattaacgatctgccgctgtgcctgcatgcggatcgcgtgcggctggtcaatccctgtccgcagctgcaggcggccggtgccggatacggctggccggtgctgagctggcggctggaatagcggagcggataaataaaa

SEQ ID NO: 241 - DNA, 837 bp, Klebsiella pneumoniae
  marker
aatggcgccgatccggtcacgggtactcatctgtgaggttgttgaatgcatgcaggtctccagtttgttatccacgcgttgtcgcgcgcctgtcgctgaagactgaaacagaaccgggaacgaaataagcgtaataaacgcatccactaatgcattttacgcatgaataacatttaactaattaacattacttttacatacaatcatttaacacacaccgacctaaccacgccgcgggtgacggcgaaaaagtcagttttccgttttgtgaccggggccaggatatgtcgccgtgggttgaaggcataaaaaacctggcctggggtaacgaaataccctgccggctggaaagcgcgtcaaaaaaaggaagcggtggactcccccaccagcgtctgcaacagggagataagccagcgggtagcctcgcgtttcccgctgcgttggtgggcgtaaatcttgacgtcaaacggcggaaccggaaacggcagcgggaaaatggtcagccgggcggcgcgggccatcgtctccgccgcccgccggggcagcgccatcaacaggtcgctctgctcaataataaagggcgcgctcagcatcgagggggttttcatcgccacctgccgcgaatagccctgtcgctccagctcacagtccagcaccccctgccgctcattccacggggtcaccaccagatgacgggccgcaaggtaggcgtccagggtcagcgccgtccggttggcctggctgatgaccacatattcgtcccgcagccagttaatctcctcaagatcgggatgggctggctcgtcaggggtattgaacccgagggccaggtcgacc

SEQ ID NO: 242 - DNA, 833 bp, Klebsiella pneumoniae
  marker
gagtatgggacgtgttgtattaatcatctttcttcacttacaggtggctaacgctgacctgccttgttgatgctttacgccaggtttccggctattccctgagcctcgtgctcaccgtctaacggcggataaacaactggacgaacgttattacatgccaaagtactcgtctgggcaaatgcgcagaactgcggagtaatatattgttcgtatttctcattattatttattaccacgaccagccaggcgccatacgtcgccgcgggaacccggtcagtgatgctgagaaaatcgctcttctgaagcgtaactttccggcagaaaatgaacaataaaatcctgtaataacaatatattaaatctcaatgcaaccgcagttcttggcggttaacacggatattaacggtgatattctaacctatccccctcctttttataagccttaataaggattaactgagacaattttaaatttttttcaacattttatattaattaacaaacctcagattattacccgctaaaaataataataatgtggttgcacgctgttttttattaaaattatttaacatcaaaattacaagccaatcgcgcttgtatgcaggatagcgttttttagacgactccccctcctccctccccatattaccgggcaaacaaacgagataaatgatggcaaaatcgctactaaatctatatttacgaccaaaaaaatcgacataaaaaggcataagccacagaccaaatccgcaatcggtagataaatcaattgcgcttaaaatccggcgttagcaaaatcttctcctgcaaagccttcaaaacagcgggga

SEQ ID NO: 243 - DNA, 810 bp, Klebsiella pneumoniae
  marker
cgccgctttgttcagtaccgccccattcatagggggttccctgccaggtgtgcatctgatcatgcagggccgccaccaccgggatcagatcgtccgatccgctatcaatggtcatatccgcatgagattttgtgttctttgcctgtttcggtgaggaggagcatcctgccaacaacaaaaaaggaattaaaaagagagcatgcgtcagttttggcttcatatcgttattttcgaagtagcaagcagactgctttgttttatagccgattaaaaaccacggctgaataagccgaggccgcctttacgtttatttacgattaaaaataaacaacctcgggatggatcagccataaagggcagttgtcactccgcaacggtctgtgccaggatgctgacaggaacatttcacgaggcattccatgacgcattacgccatctctggtgagactttgcccggcgccgctttcgacgcggggtggatgacgtctgcgcctcatcatcgcttcgccacgctctgcccaccgcctccccctccagaccgggtagttttcggcgcttaacgccgtctttagcaggcgcttacctgccggtatgacgcttgataccttgtgtttgacgttctggagcatgctatgcacgttcgctattctctgctcgcctcgcaggcgacaacggccctttttgtgctgctgtggggcagcgcggccatcttcacccgctggggactggataacgcctcgccgatggcgctgctggtctttcgttttctggttgccctggtcgcgctggcgccgctggctatcgtccgtc

SEQ ID NO: 244 - DNA, 787 bp, Klebsiella pneumoniae
  marker
cgatctggacgaagcgctaaaggatgtgctgagttaatggctgacacaggggagcattggctcctctgattccattctgctggctcatgctccacgcctgaaagatggcctccccctggcgctgcagcatcgccatattcaggacaaccagcgcccttaatcgcctgaattcaccgccagccggccggttcgccggtgttacctggcaaagcaaagtgctaaggtaggcttttctttctgcgtattgactgctttatgacgaccatcaccacaccacgcctttcgcttacccgctttgttaccgatgactggcccttttttctgcgcctgcgccaggatccgcaggtgatgcgttttatgggggaggtgttaagcgaggaggcgctgcgcagcgtcttcgtcagtcgctgtgccgatcccggggtgtttgtattgcgcgataaattcggcgaggcgctgggcgatattgggctccgcatcagtccgaaaaatccgcacgaagctgacgtcggctacgcgctgctgcctcaggctcagggaaaaggctatgccagcgaagcgctgcgggcggtctgcgagtatggtttcaccaccctgggggtgcaggccatcaatgcctgggtgctgggtgaaaaccgtggctcatcgcgcctgctggagaagcaaggctttgtgcgcacccaggtgctggagaaagcctatcatctgaacggcgtcgattacgatgactggatctatcggctggagcgggaagctcatccggcgtccgcagacgccggatgagccg

SEQ ID NO: 245 - DNA, 774 bp, Klebsiella pneumoniae
  marker
attaaaaaatagtttaatgagagggtgctaatcctaattctagagcatatcgcggacttgcggaatctctttgaaagacaaagttttttcaccacaaactgaggctgaaagcgccgggggcgagcagcagaagcggccacagcagaccggagctgacgttagccagctgaaacgaccacagcggcagactgctggcgccgctaacgaagggcagcgtagccctcaggggagagagaaagcggctgaaaaaagatagcccacgggccatagcgctgaaagaagaggcggctgcgggccagacgctcggcggtcagccagcgtagatgggtgaggcgatgacggtagcgaatgcccagccgccacgatagccagaatccgccgatggcgccgaggctggcgctggaccacattaacaggaaatgtccgaggctggcggaagcgaatgtccccagcagcagcaggccggaggtgccggggattgccagcgagaccaatgcgcaggatttagtgaaggtaagcagaaaaacaatcagcaatacccatggatagtggtcctgtgcgctctctatgagcgagataattaacgacaccgcctctcccgcaagctattcccgtctggctggagtgtggcaggggcgacttaaacaacagttaaatgataatggccgaacgtcgcgccgcgagtccggctggcaactatgctttaacaggccgtaaactttcactcactggtcgaacgtgtcacaatggacgcctttcggcttttacttatgt

SEQ ID NO: 246 - DNA, 758 bp, Klebsiella pneumoniae
  marker
ttcccacccagcgccccgacgctggcgcagccgctggcgatggcctcgttaattgaccattcccccaccccaaagcagctgcagacgatccgcccccgcggcgcgactgcggcgcccggtcggccgctaagcaaggcatgtcgttgggcagcatcggacggcggcgcggcaaaggcagcgcttatccatgcgcaatccaccgccggctcgcgcgcatcgctccaccagccgagcatcagccttccctgatgccaggccagcaggttccacaccgcgccgccgtcagccacctgtaactgccagccgcgccgggcgcaccacgcgctgagccactgtcgggcagatgcctccccggccagcgagtagtgcagcacgcctggcgtcgcccgccgccgccagtgccaggccgcaggaaatggtagcggttcgcggcaaaaaagctcgctgtgccaggccggttgccaggcggcaatcgccaccgccgcctgtttactttccggctggccggaatacgggtccgtgacggcggccagcaggttattcacccgcccctgacgggcaaactggttgttccagtgcatcggaacaaacagcgagccggggcgctgcccttcgctgatcgccactttcgccaccatcaccccatgccgcgaccagatccgcgccagcccgtcagcgggaagctgatagcgaacggcatcctgcggcgccacctccaccattggctccgcgatatgctgcatcagccgcggcactgc

SEQ ID NO: 247 - DNA, 735 bp, Klebsiella pneumoniae
  marker
actgacgtggctggcctttgcccccgacgcggaacgcgacgccatcgtcagcatgctggccgcccgtccggaagctgagtatcagctggcccgcgaaccggaacggctggcggcgatcctcgcccgcacccgccagaacggctatggcgaaaacttccgcggctggcggcaggaggagaaaatcgcctcgatcgccgtgccggtctgcagtcagcagcgggttatcggctgcctgaacctggtctatatcgccagcgcaatgaccattgagcaggcggcgcagaagcatctccctgcgctgcagagggtggcgaggcagatagaagcccgcatggaggatgaagaagtgtggtacgaaatgccctgatcgtgatgagggtaaccgcgatcgcccattgcgcccggcttcgttatataatttaatacacaacgaaattttcacgccattcgggccacaccatgtcaaaacaccccttactgctgggcctgacgctgctcagcgccagcctgttcaccggccaggccttcgccgaccgcaccgtcaccgaccagctgggtcgccaggtcaccctccccgaccacgtcacccgcgtagtggttctgcagcatcagacgctcaacctgctggtacaactgcatgccgccgaggatatcgtcggcgtcttaagcagctggaagaaacagctcgggccgcagttcgcccgctttatgcccgagatcgggcaactggcgacc

SEQ ID NO: 248 - DNA, 715 bp, Klebsiella pneumoniae
  marker
gacggaaacggccaacagcgctatcggggggaatgtctccttccgcccgaaatcagcggatgattacctgcgcccgggcaagaccagcgccttcggctaccgcagcggttacgactctgcagatcgcagctggcacaacggggtgaccgtcgccggtggcgatgagttcctgcgcgggattttggtctatagccgccgtgacggccaggaaaccgaaaacaacagcggcaccgtcgacgcctacccggcgaactggcactccgatgcttttctggcctccgggatctggcagcctaacgatgagcacaagctgaccagcaccttcgactattaccataaaaccaaccacacccactacgatacctgggactccagcggcaacagcaccatcggcaccgccaaccagaccagccagacccggcgctggggcctgagcctgaaggatgactggacgccgatgaacgactacctcgacagcgtctccacaaaaatctactaccagcataccgaagcccatgactggacttatatgccggacagcgtcacccgcagaatgcagacggtgaactctaactacgataccgacacctggggcctgcagactgcgctggcgaaaaccctgggccgccacgatctaagcgccggtttcaacgccagcaccagcaaaacccagcggccgttcagccagtcgccgatccccagcgtttacagcgag

SEQ ID NO: 249 - DNA, 689 bp, Klebsiella pneumoniae
  marker
gaccgatgcccgtctctcgcgtcccagccgctggcggctgcatattggccagctggagatcaacagcgcctgcctgagcaaactgccggccagcgatccctctcccggttcaccgcgcacgcttgccgaatggcaatcgatgttgccctatagctggttaaccattgacaatctgcggctgtcgccgtgggagaaatggcaggggcggctggtaatgtcattaacgcctgcgcagcaggatatcggctttgccgggaaggaactgagtctgcaggcgcgcctgcgcggccaggcgctcaccgtcagccagttcagcgcccggctgactgacgatcagccgccggtgaagctggtggggaccttccatctgccgctggtgccggatggtctgccggtcgacggccagatgcagggcaccttcgaattcccgcagactgcggaatggatcgatgctgagctcgagtggcagcacaatcgcggccagctgctggtcaccccgcggggtgaggtagagcctattctggacctgccgtgggagatcaccccggagcggatcaccatcagcgacggccgttggcgcacccgttacgaggcgtatccgctgcgcgggcgggtggcgctgtcggtgggtaactggcagcagggcaccgaacagatgatcgtcagcggtcgcctgaatgttctcaccg

SEQ ID NO: 250 - DNA, 684 bp, Klebsiella pneumoniae
  marker
tttttttagataacgccttcaagcttagatgaaactgaccgcaatgtaaccgattacccctgattttttgctggttttattcctctccggctgcgcatactctggaagtacacaggatgcaaaacaggatgcacatcaaatggttaaaggattgttaaacacagtaaatcgcaggctgtcgcatgatgacgccggtaaactcttgttacgacttgccgtcggcggcttaatgcttttccatggaatccataagctgatagatggtgtggatggcattagcgggatgctggcggcgcagggattgcccgggtttatcgcctacggtgtgctggtgggggaagtggtcgctccctgcttgttaattctcggcgtcctgacccgcccggcggcgttggtgctggcgttcaccatggtggtggcgtggctgatggtcggtctcggcaagacgtttgcgcttgatacggtgggagcgtgggccattgagaatctggtctatttctttgttggcgcactggcgattgcgctactcggcgcggggcgttattcgctggccggtcagtcggcctggcggtaaaaatgcctcattcgtcctggggcgtaaagtcgatactgttggcgatttgcaattttttcagtccgggaaagcgtttatctcatgtcgcctgagcgtttgtttattgtcgc

SEQ ID NO: 251 - DNA, 667 bp, Klebsiella pneumoniae
  marker
catgcgtccccacggcgatgcgccaatcaatcctccctggatcaacagcgcattgagcgctccgctggcaatcgtgccggcgacggccagatgcccgtaacgtgaaaagcgcgccatggtatagaccgcggccggccgccagcgcccctgcgccaggcgcaggcaatagataaagggcaacagaccgccaaaccagctggcgacgcagaagagatgcacagcgtggtttgtccgctgcagcacgccggtgagaccatcgtgcatagcggcgtgccctaccccggcggaaagcagcagctgtgccgccagcagggccaccagctggcgggcgccgtgacggggacggatccacactaccgcaagtgcgatccacgccagtaggatctgccagatccacactccaccaaagcgggtcccggccaccgcctgccagacggcgggtcgccagacatccgtccagccctcgcccattattcctccctgcaggagatacagcgccagcgtagagatcgcgccgatcagcagcagcgggcgcagtagtggataaaagcgcagcatcagcacgcgtctcagcggtaccggcgcccaccaggcgccatacagcacgcagccaaaagccagcatcagggagataaagtgcccaaagcgcagggtaatatagagcccg

SEQ ID NO: 252 - DNA, 657 bp, Klebsiella pneumoniae
  marker
acggtaatactgggcgatcagccgatggttaaagatatcgaggaaatcctcggtggcctcgacgccttcccgccgttgcgcaatgtcatcgctatagtgggtcggcagcggggattccacgccgtagagtcccataaaagtcacgcgaaccgccggcggacggggcggttcaggatcgtccattccacggatttcgccagccggaaagcccatccccggatgcgggcgaaagcgtatgggttcatcacctactagccagccgctgccgatgatcggcgccttcggatggttcttctccagcaactggcagaagcggtaaaaattcatgtacggcaactgaggccggagctgcgccatcagccgggcaggcgcagactgtgattctctttccaccggatacatttcccttcaggttgaacaatgagcgtcagctggttgaactgattcatatcggcatacagtgcgaaaaagcggttgagcatgtcgccaaacaggtggacatcgcccgcaccggtaaatccgctaccgtcgagcgtcacttcaatatccagcccgcgcagcaggaagccctgctcgaaacgctgaattcggtgatggctgaccgccagaatggcgtccagacggcgattattgagctcatcctcccgccagttgtag

SEQ ID NO: 253 - DNA, 614 bp, Klebsiella pneumoniae
  marker
gacgaagcgcggcgcaggccgcgcttttttctgattacgcccccgttcccttccttctggaaagttcttaaaacaccgctaattcgtctgttttttatccatatcctccgcaaccccttcgtctgtctactatatttaattcgtgtttttaaaaatgctggcgtaattcactgcgataagacgccagcgctggtgaaaaaacgaggacataacgatgaccagactaaagaatgccaatatgttgctggcgctcttcttaggcttagccgcgttgaacgcctcggcagagacggaaaaaacaacggtagacagtgcgaagtcggctgccagcaatgcgggagaggcggtagataattcgattaacaaagtcggcgattttatggacgacagtaccattaccgcacgggtaaaagcggcgctgatcgaccataaagatattaactccggcgatatttcggtgaaaacggagaataaagtggtcaccctcagcggcgacgtcaccagtgctgaacagaaaagtcaggcactgagcgtagcgaaagaggtcaaaggcgtctcacacgttaacgacaagctgacggtccatcataaatcatcgagcgagacggcgacgc

SEQ ID NO: 254 - DNA, 613 bp, Klebsiella pneumoniae
  marker
ctggctggcgttttcgccgccaccgcgacaaaaaaaatccacgcagcggcgtggatttttttttacccaaggcgacacgctactccacaatatgggtatcttctgccgcctcgtagccatcaacgatctgcacaattttctttaactcagcctcaataaaagccggggtggcgctttccccagaggccgggtgatgaagctccaccgagatgccgctggcggcattggtcagcgacaggctgatctcctgctggccccgcgaggacgaagaacgcccgatatgctgcatgatagccgccgccgccgcgcgcgtatcaacgtctgcgagatgacccccatctcatttcaacatgcccctgctgccctgcctttatcacctgcagcgtatagccgcttcttgccgttgccatgccttttcctccgatttagttgcccgggagtcgcattatcagcccggttttatcagccaggttcgcgcacctgcgccttgccgttaatgactcttttccacataggtctgcatgttttctttggtcactaactcaaacgggatccagacatgagactcgaccttttctcctttaatcagcttcagcgctaccgctaaggccgt

SEQ ID NO: 255 - DNA, 604 bp, Klebsiella pneumoniae
  marker
cgcgaaggcaccgtggtgccgtattacgacgccaacggtaaggcgcacaagctgccgaccgatttcaacgaaggcgagtccgataataaaatctcccgccgccagaagatggtgggctacagcttctcccatcagttcgatgacacctttaccgtgcggcagaacctgcgctatgccgatgtgcatacgctctatcgttcggtatacggcaacggctatgtcgcgccgggctacatgaatcgcgcctacgtgcgctccgacgagcacctgaacaccttcaccgtcgatacccagctgcagtctgatttcgccaccggcgcggtcagccatacgctgctgaccggcgtggactactcgcggatgcgtaacgatgtggatgccgactacgggacggcggatcctatcagcatgagcaatccgcagtacggcaatccgaatattcaggtcaccttcccgtacgcggtcctcaaccggatggagcagaccggcctgtacgcgcaggatcagatggagtgggataaatgggtgatgaccctgggcggccgttacgattacgccacgacctcaacgttaacccgcgccaccaacagcctggcggagaatc

SEQ ID NO: 256 - DNA, 593 bp, Klebsiella pneumoniae
  marker
attaatgttggaatgaatggcattgcataacattcactccgtaaattacaggcaaaaagttagtgtgcgctatctcacagaaatgcgccattgctgagatttaacaataaccacatcgtttcaaatgcgtaacaattcccgattaaaaattggcgctgacccccatcaaatagagcgtattttcccctgacggcaggttatccgcctgcgacagcgttgcccatgccgccacgtgggatcccaaccgcatatcagcgcccagggtgacatcgctccagcctccctccctggcacgggtcatcggcgcccagacatcgctggcgagcgactggttatagctcacctgcgcccagggatgcacgccccacagcgcctgataatccatgcgccagccgagcgtgttaacgtagcccacctcgcctgcgcttctcaccgtcggcgcggtgacgtcgctgcgcaggctggccaccggcccggaggttacgccgtttgctagcgggtaattccagccaacgctcaggccacggccgctgtccggcggcgccagcccctggtttaacgccagcccgccgggcgtctcagaggacttcatc

SEQ ID NO: 257 - DNA, 584 bp, Klebsiella pneumoniae
  marker
gctggcggagagcgtcgtgccgcccatgctttccagcagcagtcgctggctgagctggaccattggcagagatttgtccagccggcaggcggtagtgatgtcccctgtgggcgccacccgctggcgcggcagcagcagcgaggcctgacgcgaggtctgctgccagacgatggagcatgggcgggcggcgtcgattaacgtgatatcgcctgccgccagcgtcacctggcgatcgtcctgttcgatgatggcttcgccggcgagctgaaacacggtatagaaccaggcgtcgttatcgcgttttatctcattgcgcgtgcggtagagattgacgccggcggcggtgacggtactgaccttgaggctgccggcgtagcgggcgtcaatctcgccgtggaaactctcctccaacggccgggcggcgaaatggccgcagacctgattgatcgtcgccagccagcgctgatacgccagccctccctctgccgtggtcatcattcgcccttctcctgtaataacaatgtttccgcattgttgcatttgtgtcgcctcaggcaagggcgcgatggcgggtatatgaaaga

SEQ ID NO: 258 - DNA, 573 bp, Klebsiella pneumoniae
  marker
taaagcgggtgatttcgccaccgccgacgccaaaatgcaggaagcggcgcactattcccgcgaagctcaccttgtacagacccagcttatcgaagctgacgaaggcgagggaaaaaccaaaatgacgctggtaatggtccatgctcaggatcacctgatgacatccattctggcgaaagagctaattgccgaactgattgcgatttaccgcgcgcagccgcttcacgcctagcgccttgcccggccagacgcgctggccgggcctgattccccgaggtcactatgttacatcttggaatagatattggcggcaccaaaatggaagccgtactgctggacccggcgggcgaatgcgtccagcgcctgcgccggccgacccacaaagagagctatgacgcctttatgcgtcagctgctgaccctgattgccgatattcgcgcggtcagcccgcagccgttcaccctggggatcggcctgcccggggctatcgatccgcaaagcggacgcattaaaaactgcaactgcctggtgctcaacggtcacgatctgcgccgggatatcatgcagcagctt

SEQ ID NO: 259 - DNA, 557 bp, Klebsiella pneumoniae
  marker
gggacaccgcaacatcgccctgctggtggacagcgatagcgacgatgccagccgtcagatgctggaaggctaccgcaacgtcctgcagaactactccattccttttaaccgccagctggtgctgacggccaacgatgacgtcgagcaggcgctgctgaccttaattaacagcttcagtaaatactcagtcattatcgttaaacgcgaccgctacgcggctgaggcgatgcgtctgctgcgcgaattcaccatcgccgtcccgcaggaggtctccctgctgagccttgaggattccccgctcgcctcgctgctctacccgccgctgacctgcatctcctggccactggaggcgctgctggataactgtattcagcgtattcgcagcctgattgacgaccggccaaccttcaccgccgagggccgctcgctggctggccgcctgatcccgcgccagtcggtcgccgatatctcttgatcttcgcccggttggcgccgggccagacttacctccccttttcaaagcgctttcgtttccgggctcattattacccacgcat

SEQ ID NO: 260 - DNA, 556 bp, Klebsiella pneumoniae
  marker
gtacagggcgaccatccgaccagccaccggcggatcgtcaatgctgtcattgagctgcggggcgatgttcagcagatggcggatgacgcggctgaactgctccgtcgcggcttcagcggcaatttgccggcggccgatctgcgcgcgtagcgccgggagctgcgccagctcgtcaaccgctctggcgatacgccagcacagcgcgctgccggctaccgcgcgcgcccgttcgaggctggcataaaacagggctagccgctcgtcaaccagcgcccctcccgcccgacactccgctgtatacagcaagccgcccgagcaaagatagatattcgacgccccgcgctcacactgcagcatatgcaccagcgcgctgagctggctggccagttcccccagttggctaagctgctgaagctgttgtttttgcaggcgacgcgccagctgcagccaggccgtcgcatcgtgcgcatgaccagtcgtattattcatacccctcctccgggttaacgctttatactgcactaaagcaataaccgtgcctttaagaaggagtttg

SEQ ID NO: 261 - DNA, 550 bp, Klebsiella pneumoniae
  marker
ccgccaccaaccgcgaaagctacagcaacagcggatccgccatcaccgatgccagcagcgactatatgcgcgtgccgggctacggcatgctggactggaccgcgtactggcaggtggcgaaaaacgtgcgcctcaatggcggggtctacaacctcaccgatcgtaaatactgggattacctgagcagccgcaatatcgagaccggcaccaaccaggacgccaacgataaagcgctggcggtgatgccgggccgcacctggcagctgggcgtcaacgtcgacttctgattgcccgaataataacgcacctgcccccggcccgccggccggggatattcatcgtcgagaaggatatgattatgccaaatgcacaccctgacctgtggcagcgctaccaggccaccaaagcggccagtaccgcgaaatatgcccgcgatatcgccgcggaaatggggatcagcgaagccgagctgaccgccgcccgcctcggccatgatgccgtgcgcctgagcgatgacgcccgggcgctgattgccgccctggagcgcgtc

SEQ ID NO: 262 - DNA, 540 bp, Klebsiella pneumoniae
  marker
tttcccctctttatcgaccagcaggtcgacattggcgttgccccacggcgagagccaactctccagctgatgactcacttcattgccgattttactgatggcaaacagctgcgcctgttcacccgccgtcagaccattgtcgctcatgctggcctcgccaaacttcttcgccacttcggcaaagtgccgggcgtcgtcatcaacctggggagcaatccccatatcgggcagcggatcttgcgcttgcgcagggcgggtggtgtcgctggcggtcagcgcccagacgggaacgcccggcaacagcaggagaaaggtcaacgttggcaacaaacggaacgacacaggcattaacagagtttgcgcaagctcacaaaaatggatagaagtgttagtttatcgttttttcccatgctcccgcagccctgtgggcaattccaggaataagctgaaaccggttgggtaaggtgccgcccaaccggaggcgtcgctgcgcgccaccgttacgccaaaaaacgggttcgttgcgccgccagcagcgcg

SEQ ID NO: 263 - DNA, 536 bp, Klebsiella pneumoniae
  marker
acaacggaagtgatggagtctgtcagtgagtaagaagaaaaacagaaaaaaggcgtcaccaacgccgttagccccggtgcaaccgcaagtcgccggggccgccagctttggttatgatgagatgcttagcgaactggaagccattgttgccgaagcggagatccgcctgcgggatgaagaaagtctcgcctgaaacggcaaaatggctgggttgattttcattaatggcctgaagaagatatcggccccgcgaggggccgatggcattattcactcagcgcgtcggcaagatcttttttcacctgcgtgcgctgctccggcgtcagtaccttattcacctcaaaatagtacttcacgcggtaataacgcacctgctgatcaatcttgctgaaggccgccagctgatcgttgaccgctttttcatcccatttaccggaatcaattacgtttatcagagccccgtctttaatttcctgttgggaaatctgctggacattactctccaactgctgatgcaggcttttaattttcgcgac

SEQ ID NO: 264 - DNA, 536 bp, Klebsiella pneumoniae
  marker
gcaatggcgtcaggactcatcatcgcgctctgcggccctttcgtttgccagaaacctgcaaggccagccggcgccggcgctttaacgacgtcctcataacgatcaacctgtacgcaaccggccagcgccaccaccatgccagcaaaaaataactttttcatcattcatcccacaagccgataaaaaagtattgtggcattaaagcgttaagccttccacccccacacgcaaagggataagcgagcaagccagcaaccgctaacgtgggtttcatttgaagtaaggaaattctgaaagtaaaagaatactgggcgcgtaaccatagcatctatgggcactttttgtttttaattcggtcacactaccggttcttgactttactttaagagttttcctggcaaattatatgcatagatgcggaatagtttaatggagctaatgggttctttctaaacctactattattatcgcccgcaaggactgcttcgcacagccagtgcgaagtgtatatcgttacgtgttgattgaggatgggt

SEQ ID NO: 265 - DNA, 535 bp, Klebsiella pneumoniae
  marker
  misc_feature (502)..(535): n = a or g or c or t
gccgcttttgagttcatcgtcgtctcgctaagtctgaaagggcaaattgtaaacaaagtgcagtttaaatgaagaacacatgattattttgttgcaaacgataatacctatcattaccattcgcaatcaacaaatggagtaagaccctatccgcaacggaaaagacggagcaacctgcaactctggaagtaacgcgtgagccgatactaataacgatcaaggcgtggcgactatgtacaaatcgactccgtcagcagcatggtgtaaaaaaggcctgctggtgacctctttgtttgcagcaatttatcagacttctgccatcgcagcagatacttccgccgttagcggcgaggcggtggatgacacttcggaacaaatgaccgtcaccgcccccgcgccggtgcagaaagccggtagcgaacacagcatcagcgcccgggagctggagaataaaggcgctaacgatttcagctcaatcatgcgctatgagccgctcattagnnnnnnnnnnnnnnnnnnnnnnnnnnnnnnnnnn

SEQ ID NO: 266 - DNA, 531 bp, Klebsiella pneumoniae
  marker
caccgccttctggctcggcgccgcgctgatgctggtggtggacgatctggcgcgtacgctgacccaggcggagatcccgatcgggatcatcaccgccctgctcggggcgccgctgtttaccgtgttgctggtgcaatcccgacgccggagtacgacccgatgaacagctcattatcgctgcaagcgctacgctacggccaccgtcagccgctcttcgccccgctcacgctggcctgccggcccggtgagatctgggcggtgctgggcgccaatggccggggaaaaagtaccctgctggataccctgaccggcgtgctgccgccgctgggcggcgagatgcagtgcgagggcggcgtggccctggttccgcagtcgtttcgtcccgcttttcgctggcgcgtgagcgatgtggtgctgatgggccgggcccgtcacgtggatctctttgcccagccggacgaggaggatgcccggcgggttgagcaggcgctggcgcagctggggattgccgccctggccgaagatgacttc

SEQ ID NO: 267 - DNA, 530 bp, Klebsiella pneumoniae
  marker
cttcacgtctgcctgggcgtaaaaggccatgctcatacaacctgctatcacaacatgaagcgtcattgttttcagtttcaaagacattcggatattcctcagcgatgtaaagcctggcgtcatggaatgacgcagaaaatatcacttaccgtgtggtgccgacgttggcgcagcgccaggacggccagggtggaagaagcaaaaatcccgccaggaaggagtggaacaccggagaacagtcgccccggtcggtacgcacgcgacggcaacccgtgccgcatccggcaagggcgcattccctttcaggtcaggagatcggttgccatcacgtggcgagccggacaacgcggtatccgtaccggcccgtgagctaaacatagatgcagttagcggtcgctgcgcgccggcgtggtgcaaaaatgcgaatatgatcaacagtggtgattattttgttgcggtaatgtgaagatgataacaggagagcccgttaaaggctctcctgtgacccggtggccgctcagagtcggctg

SEQ ID NO: 268 - DNA, 521 bp, Klebsiella pneumoniae
  marker
ggcgccagcggttcgcggcgcccggttcactgttccacaccggcataatgatgctccagccatcggggctgctggcatctaccggcggcgtcaggctgagggcctgggtgtctccctgccagtgcagcgccttgatgccatgcagactatggatctgcagcttcaactgcaccgtctccccggactgcagatcccagggcggcgtggccagatagaccgtcagatttttgcgctgacgatactccaccaccggcagattatcccgctccggactatcgaagcggctcccgcgcagcgagttgctgatcgccacctcgtctgccgcaagctgctgcttaaggggtacgccaaagcgatagtttagcttcagtcccacattgttctggctgacgccattttccccctgcttatgcttagcggtcaccgtgaccagcgggaccggggtgtaattgagcccaacggagacggccaccggattatggtagccggtgccggagtgaaacagatcgacgctatcgccg

SEQ ID NO: 269 - DNA, 500 bp, Klebsiella pneumoniae
  marker
cttgtcgatcgtcgcatccagggtattgagctgggcatcgtggcacagcatccgggtcatcgccagcgatttgaccttcagctcgccgtccgacactttaccttccccgctaaagccgttgcacatattgccggatacatacatcttgcccgtaatagccatcttctcaccgaagcttagctccagcggccggtcgctggcgttgaccgcctggccgttgacgctggtcagcacgaagcgatgatgctgcagctgttccgcaccggtggacaccttactgttatagacacagccggacagcagcatacctgccgccagaagcgccgcaaatttgttcattttcactccaaaacattcacataactaataaaaccaagccagtgtaacggtatcgcagcagggatctgtggggattatctgaatgtgctccccccgggagaggagcacaaaagggaaaggcgtcagacgatggcgttcggacaggtttcgccgttggcgac

SEQ ID NO: 270 - DNA, 495 bp, Klebsiella pneumoniae
  marker
cgacgcctcctgacgatgcagctcactactggcgggtaagcgctgaaaagggcaacgttaagttgccctttttgctatccagcttgctatgccagggtggtataatctttaagcttctttacattaggtaaggcaaaagccttttcgtctttatatactgtgttaaagcccacgaatttgtgggcggcaatgtgtgacaacagggggcaagggatgttgcttaagaaacggtatggtcgtccattgtcagcgctcagtctgagcctggcaatggcatttgctccgctgttcaatgtccaggccgcagagcctgaagtcgtaccaggtgatagctccgctacgcctggagagctttccgtcgcgctgtcgcaaagcgacgggcaatcgccggcggtcgcgaagctggccggtgagcagccgctgtcgatggaagccgcggcgaacagtcgcgcccagatcgaagcgctattgccggctggctacaaacccgtcttt

SEQ ID NO: 271 - DNA, 495 bp, Klebsiella pneumoniae
  marker
ccagcaggtagaccgcctgacccgtgaagggcagcccgcatgatgcgctggttactgctcttcatcgctttcccgctgctgagtcacgccgccgttgagcggctcgtcaccctcggcggagatgtcactgagatcgtttatgcccttcacgcggaggagagcctggtggcgcgggacagcaccagcagctggcccccggcggcgcaaaagttgccggacgtcggctacctgcgacagctgaacgccgaggggatcctcgcgttacgcccgcagctggtgttagcgagcgcccaggcgcagccctcgctggtcttacacaaagtgcaggcgagcggggtgaaggtggttaacgtgccgggcggcgaaagtctgtccgcgatcgataacaaagtggctgtcattgccgaagcgttaggcaaaacggcggcaggcgacgcgctgcgccagcagcttcagcagcagatcgccgccattcccacgcagccggttgctaag

SEQ ID NO: 272 - DNA, 493 bp, Klebsiella pneumoniae
  marker
accggccgctgtaggcttcaacttctttccccagccgctgctgctcgtcaaggctggtcgcctgcgccagctgacgctggcgttggtcgcgcatcgccagcaggcggcgctcatactcctgatgctgcaggcgacggcgctgccagcggctcaacgttggcgacgcgtggtcccaactgcgcaaggaccaggtggcggtttcacggcgcagcgcggcgatttgtgccgccagacgctcggcaatccagaccacctgcggcagctgctggcgctcgacggcctggcggagctggttaaagttgtgttgggcttccgccagataggcctgcatcagcgtgctgcgggtgtggaagagctgacggtcaaagcgcgggctgagggtcgcgtgctccgccagcggcgccaccagcgcggccagctcgctgagctgatcgttcagcgtttgtaaaagttgagctgttttcaccacacctctccattcccttccagccaa

SEQ ID NO: 273 - DNA, 492 bp, Klebsiella pneumoniae
  marker
cctcgccgccgcgatcgtgggtatcctaaccctacgtaaggcgcgccgctccacgctgctgcgtctaacgcgtaaagagctggagaacgaccgtgcccttctggaggaggataaatcgtgaatggccgacaggagcgtgaacggcaaaagacgcagctgctgcgccagatccagcagcaacggctggagctcagcgcctgccgccgtcactggcacgaggcgactgcgcccctcgaccgcggctggcatacgctgctgagtttacgttcgtggctgatggttggcagcggtctgatggccgtatggtccgtacgacatccgcattttttaatgcgctggaccaaacgcggactcggactgtggagcacctggcgcctggtgcgcgggatcctgcgccagtcggcagttcgctagcggccctgagcgtgggcgctttccctggcgcccacgctctgccatttccctgtcccttactgcacgctgttcgcagca

SEQ ID NO: 274 - DNA, 481 bp, Klebsiella pneumoniae
  marker
gatctacaccggacgccggcgggaagggatctatgccggcgccatgaccttctcaggaaaaattcttcgctcgattgtggtgttctcgatgggggcgatcctgagcttctacggtttccagtcaaaagcgcacagccaaccggaaagcgcggtgactgctatcgcagtggtattctgcgtcggggtgatcgcattagccctggccgccatcgtcttcagcaagcagatgaagctggaccggaaggcccatctggtggtgctgcaggaagtcgcgcggataaaagcgggcggcaaaattagcgatattgcgccggacgtgcgggttatcgtggaggatctggtcggccatcgctacgaagagtgctggggcaacagcaaattgttcaaagatgctgcccctgcgcctgcgcagaccgtcgtttcccattaaagaagaaggccccgccggtatccggcgaggcctggtattaatgcgtttctt

SEQ ID NO: 275 - DNA, 479 bp, Klebsiella pneumoniae
  marker
ctcgtgtccggcaggatcgggctgcatcagggtgatatcgagctgcggatagtgctgatgcagccgcccggcgagggcgtgcgccacctcgggccgggtatcgtacagggtcagggcgctgacccccgccgccgcgagggaggcggcgatagccgatcccaccccgccgctgccaaccaccagcgcccgcgtcccctgcgggttaaaccctttacgacgcaggcccagcacaaatccctcgccatcgaacatgtctccgctcaggctaccgtcagcctcgcggcggatggcattgcaggcgccagcgatggccgccgtcgggctcaggcgctgcaccagatcgcaggtggcgattttatgcggcatcgtcaccagcgcgccgatgatgttggtcatcgtaaacagcggcggaataaacgcggcgtagtcctccggcctgacccccatcggcaccaccttcacgtccacctgctggtcaa

SEQ ID NO: 276 - DNA, 476 bp, Klebsiella pneumoniae
  marker
  misc_feature (460)..(476): n = a or g or c or t
gtaacataattgttttacaacgtttgtttataagccgtctcctgtgagacggacttttttatatgcagggagatgcctggaattgttcataaaaataagcggcaagaggtgatataatgttccggttcttacatcagacagaggatattatggataccgagttaaccccaacgcagatggccatcgaattcttacgccgcgaccccaccgtcatgaccccagcgcagtatctgaaaaaacttaaactgctggagctggagtttgctgacctgatggcgctctcctcgctggagctgaaagaagagatcgatctggcctggcgtctgggtatccactaagccattctcgctggacagtgacaggggccgccaacggccctttttttgtgcctggctggcagcaagcaaaaaaaatcccccgcgaggcgggggaagatgagtggtaaaaaaaagcggttaannnnnnnnnnnnnnnnn

SEQ ID NO: 277 - DNA, 467 bp, Klebsiella pneumoniae
  marker
ttttttaaccagcctgatttttcccgttttaacgggttctgtccaacgcaggaaagtttgcgattggcagattgctatcaccgacttatttattacgaccgctcgaacggcagtcttaacgtcgattcgttgaaccctcgctggagggtcgttctggcgaaatgagttaattaaaaataattctcatttgcgtacataattcagcagacgataacggcggaaagtaccaaaaggtaaacacctccgccaatgcaatttgcaaatatgttaccgaattctcttttattgccggttttgccagcgtgacaagcgtttgccataaaacgtcgatgtaaaaatatcgttattaatcagtccattacgataatttcatcagccgacatactgagcagcgaccgcaagatggttttttgtacaaaaatttaacaatagattactttttagcacattcatctgccgccttgtta

SEQ ID NO: 278 - DNA, 465 bp, Klebsiella pneumoniae
  marker
agcgtctcttcacccgccaacgtccttctcaggagtaaggtatgtttcgtttaagttttatgtttatcgcgctcctgaccgcgggctgcgtctcgcttgacccgcattatgatcgcccggccgcgccggtgccggccaccctgcccggggcgcacggcgaatcgacggcggtggtcggcgactggcagaaagtggtcaatgacgcgcggctgaaaaaagtggtcagcatcgcgctgaacagcaaccgcgatgtgcaaaaggcgctagccgatatcgaggccgcgcgcgcccagtatggcgaaacgcgggcatcgctgtttcccaccgttgatgccgaactgagccacacccgcagcaaaacggtggccagcggcctgagctccgcttcacaggccgacggcgcggtctccagcttcgaactggacttgttcggcaagaaccagagcctgtcgcgcgcggcgcgcg

SEQ ID NO: 279 - DNA, 464 bp, Klebsiella pneumoniae
  marker
cctcacgggagatgcgctgcgggcctttgcggagtaaagcggctcaccagcaggtcggcgccaggcgtcgacctgctggccgcggatcaggcttcgaccgcgctcttctgcagctgcggaccggccagcgccagacgcgcgcccgcttcggtatcgctgtactgcttgaagttatccataaacagctgagccaggctctcggccttctcctgccatttatccgctgaactccagccattacgcggatccagcaccgcgctgtctacccctggaatgctctgcgggatcgcaagaccgaacaccgggatggtctcctcgcgcagcgggccggtagtgccgttgaggatcgcgctaatgatgctgcgggtatcgcgcagcgacaggcgtttgccctcgccgttccagccggtgttgaccagccaggcttcggcaccggattccgccatcttcgccgccaggacgct

SEQ ID NO: 280 - DNA, 461 bp, Klebsiella pneumoniae
  marker
gatcctgtgtcatttttttaaaagaacgccgacaatcgttccggatttgccaccggaagggagtgggtacctggctacactaaaagctgtgaaaggaggttacctttgtacttttgccacggaacagtcgccggtggcaaaatgacaaagagatgacgtcgccacttcactcatttataaaacagcatttctctttaatcaaaagacaggttcattgatgtgatctggctggaaggtcgccgactgacgaacaggctcgcaaatcccgggatcggcccttgcgcagtcggggaaacaggagtaaagaatggaagaaagggttattccgcgtatctcaaggaggccagatgccttatacccatctgctggttgccgtcgcgccaacgccggagagtcaggtgttaattaaaaaagcggtgtcgatagcccgccccgttaacgcgaaagtgagcttaatcact

SEQ ID NO: 281 - DNA, 460 bp, Klebsiella pneumoniae
  marker
atatgcagaaaaatcgaacagtgattgagtcacattgggctccgcagcatcatcaaaattggcggttgactgttaacagcataaaataactgcgcgaaacatacgctttttacctgcaatattcattataaatatgcataacccggtgatatgtatcgaatgttagccatttgtatatttaatgctaatcgtttttttaatttcaaaaccctcccatcacacttgatcgaaccggtcaaaaagcagccagctgaaaggtatcagcagcgacaatacttgatctaaatcacgtaatttgtactcagaagtgagtaatcttgatgacaccaacagagtggaaggcagcagtacctgaaagcgaaagagataaagcttttttagtaaatcggtgaaacagcgccctgatttttctacataaacatttacatgcaagctgttaacggcctgtctataatgtcga

SEQ ID NO: 282 - DNA, 454 bp, Klebsiella pneumoniae
  marker
cgcctgactgtctcgtctctattgcggtcatagcttaactctgggttatggcccgcattcatctatttcaccggccattaacaccacataatcatcatgattatggatgattatccggttatataacaaacaactagttcattcattttttatcagcgcaaaatttctatgcatttgtgatccagatcatgctcgcaactttatgttgattgaatgttactggaatggaaataaatgtcaggcaatacaacggatgagtaaagattgtcaggataatgacccatgattttttaagataatggaccatatcactatgcttacgccagatcagtagaatatatcgccttttcccggcaaaccggcgaacccgaaagataaaaataccaacgatatcgaaacggtaaaatttaacgctgtataacattcatatgtccggagcattataccaccctga

SEQ ID NO: 283 - DNA, 438 bp, Klebsiella pneumoniae
  marker
accccaggaaatcggcaacaatccatccggttttttaacattagcaggaagtgttgaaagtgcagggaaaagtcgacaagctgagcgccttgtcacgccaatacgctgatttttctgcaaagaaatacaaaaaagattcaaaacatcaataagagtgcaaaaaaaagagccgccaggcgggaaaccaactcctgaggctctttttgggcacttacattctgttaccagtttttgtgatctttgttagcaagaatacccttacaaaaccaaggtattccctccctcttccggagtaagtgctgtgcccgtttcccagggatggatctcctggctcagagactgaaaaatcgcctgcggcagttcgctcaccgtccgcggattgcagctgacgacgtaccgggtgtccggcaacgccggtaacccctcactgatgccagc

SEQ ID NO: 284 - DNA, 435 bp, Klebsiella pneumoniae
  marker
caacaggcagcacgacaagcagcgcaaactgccagagtaatctgcataccgcgccgtcggccctcgctggcggcgcggtaatcagctatagcagacgttctcgtaacgagaatacctgctcatgtcacaattatgttactacgcagttaaaaaataagatccatattaaaatcacagtattttacgcttcccgccagtctttctttccgtatactcgactatgcaaacatctacttacatcctgacataaacgtaaaaaataatacgtggctgggatggctaaaaaaaaaaatgctacatcactggaaggaatgaattatgacaacacgcactccctcatcagggtggctctcccgcctggcgcaaggcagcctggtgaaacaaattttaatcggcctggtgcttggcgtactgttggcgctggtctctaagcct

SEQ ID NO: 285 - DNA, 424 bp, Klebsiella pneumoniae
  marker
gatgcactgctaaaaagccggtcaggtttcctgaccggctttttttattgtctatttttcgccgctttcccggcccttaattacatttacgacatattaaatcttcattttcttagcaattaattcatgcaaaatatctattagaagcctttttctaaaacctttctttatgtatgggtaaaacttctactcatatcaaaaaataatcaattcaaagggtatatattcaaaatacctgatgaatcatgggattacttctgttgctgtatcttcggcgcgacggcgctggagagggatagccgcatctcatgcttctcccggtctggcgcagaaataatcccgagaggcaggtagggatcattaatttagatctgagtggacaggctctgggggctgcatggaattcgcgatacaactcattatt

SEQ ID NO: 286 - DNA, 412 bp, Klebsiella pneumoniae
  marker
aaatctgcgcgaagtgatgcaggaagagacgcgggagtttctcaatgagctggctcgccacgcggactacccaatagaaagaatgaccatcgcctgcggcgagctaggccatcatattaaggacttctgccggtcacaccgtgttgatctggtgatctgcggcaatcacaaccattccctcttctcacgcgccacctgctcggcgaaaaatatcgtcggcagctgcggcgttgatgtcctgttggtttcccttgaaaagggctaacgccggttagcccttttcctgaactaggccagtttagggaaggtggctatcttcccccgcagacggctctcctcgctgcgcggtgaaatatgctgcagatcctcgacaaagcgcgcctgccagttatgaatatcattttctctgatc

SEQ ID NO: 287 - DNA, 410 bp, Klebsiella pneumoniae
  marker
tggcgcccaccaccgcgtcctgatcgaagaggggcggcgcaaagccgcccctgctgtatcagggcgccagcgcggcgagttcttcatcgctcagcccggtgagctcctgcacggtttgacgttcgaggccgcgcgccagcattctggcggcgatgctgcgagtggcggcttctcgaccttcctgctcaccctcttgctttccctgtttacggcctttctcttccagccattcggcaatggtcatcatcagctccttatgcctgggcgactgcgccgccagcgtgcggatcagcgcccccggatgttccgtggttcccgcctgcaacatatagcgcagcagcgtattcagctgcgcttctgtcagatagccttgcgtcatcagcgcaatcagcggcacctgcagctcggcc

SEQ ID NO: 288 - DNA, 402 bp, Klebsiella pneumoniae
  marker
tagctctaccttgaggccaaataccggagataaacggccaaacagatggccgaaagtggcaacgtgttttggattacgtgggctgaacaagcagtacagacagccaagtacgcacactacgatgcaataaatgaccacgaaaattactcgaaaaatgaatagcatagctacctctaaaacccaaaccgcttagaattattcgctgctggcagaaggcaggctcacaagttctgcgcaggccgggaccgttcttcctgggtccctgatgatggacattgttaatcgcaacgcctgaataaacaacgattttgcggcattttttcgtctcctcccgtcaaagacgggaggagacgcgcttactcttcgctatcgcctgccgcggcacgacgcggcgagtcaatt

SEQ ID NO: 289 - DNA, 398 bp, Klebsiella pneumoniae
  marker
atgcatcgccgccagctgccaggccagcagcagcacacccagccccaacagcgggggcagcaggcgctgggtgagctcacgcagccagcgcgtgacggccggcgtggtgcgccggacctgcaccggcggcaggataatcacttcgccaggcgcgttgtccacgctgacgaccggttgcttacgttgtgcctgcttcatctcatgcccccttacgttgaatagagaaatggcgggcgtagccttccgggtcggacccgttccataccgtcccgtccattagtgtgctgctgcgcatcctggctgccggcgcgctgatccctcctaccgcctgggcggcagcctgccagacatcgatgcggttaatgcgcgacgccaccgcgaggtaatccggagcctgc

SEQ ID NO: 290 - DNA, 393 bp, Klebsiella pneumoniae
  marker
ttgtttacgcgcacgagcggaccgtgccggtctttatttatcgtgataagggatgacgataaaaataaagcggcgttattctagagataatcgccatcccggagccagttaaatatattgatattatttgatttagggcaaggtgagtggattccttttgccagtttagcctttcctttatccatggaagattatcaatagtgtagatcataacgcctgaaataaaactattttgtttgatgaataatcaacagccggtaataggcgataagtgagtaattttatgaatatatttaatccgctgaatatgagccacggatgcgattaagcagagtgtcatcttgcctccgccctcgctatactgttgattactgaaggagagtggtggtgtag

SEQ ID NO: 291 - DNA, 392 bp, Klebsiella pneumoniae
  marker
tattgaaaacacaaaccgccaacaacaaatttaccctggttattgcagggtaaagctggcggctgccgtctggcccgcttcatccatcaccaccaactgccactcgccgggtttatccagcgttagcgtggttcttgcgccggcggcctctaacggttcgccattaataaaccaccagcgccgcccctccccaccgctggtttgtagcggcaacatcacccgcgcctcacccgggagacgttttatcactgccccatcacggatgccggacagcaccagcggcgcggtatcctgagtctgtaacggcgggcatgactccgatgccggtcccaggcgcgcgcgccgcctttcgctggccggcagccagggatccagcggcagcggccagactt

SEQ ID NO: 292 - DNA, 391 bp, Klebsiella pneumoniae
  marker
gcggcggccatacttcccgctggccagatggacgttgatgatggcgttacatttgtcgctgccgctggcggattgattgattcccatggtgtagagggtgatcgcccgcggggcggcgatgaactcgcgatagaatcccgccacctcatcggcaggcagaccgcaaaaggacgccaccctcgccacgtcccagccgcgggcggcggccagcgcctgcgggccgtcgcgaaagccatcgacgcaggctcctgcctcagccagggcgttaagcagccccgcaaacaacccgccgtcgcttcccggggccagcgccagatggcggtcggcgatctcgcaggtagcggtgcgtcgggggtcgatcgccacgatccgcaatcggggattatcccgc

SEQ ID NO: 293 - DNA, 389 bp, Klebsiella pneumoniae
  marker
gacgctgacgctgggcgaaaactatggcaacaaacgctggcgggattttctcggtaaccgggaagagattgtcgaaaccgatggcgaaggctgcgcgacctttacatgtaacggggggagcgtgagcgtgtgggtgttagaggaggtattgtagtcctctgacgaaaaaccgggcgggccagctatggcccgccaaaatctcagcgcgtggaggccggcgcgctgacgggccccgtcgctcgcgctttggcccacgccttctcgcactccggagtgagacgttcaacacgggacaacgtcatccgatcgtaggagatcgtgttgccctcgcgctcgacaggatagatgtccagggaagcggtcacgttgtagatctcactgtcacgatt

SEQ ID NO: 294 - DNA, 389 bp, Klebsiella pneumoniae
  marker
aagcgataacaaactcggcatcaacgatgacgacatcgtcgcgctgggtatgacctaccagttctgattaaccgcagaaccacccgccgcagccctggctgcggcattttttttagcggcgattcttcgccagatgcagggtgtcgctgttcatggtgatctgcgcgttatactccttcggcagacgacgcgcctgatagaacgccgattcccagtaagggttgtccagcgaagagcgcatcacgccctggctgctcgaggcgtgaaggaaattatgatcggtatcgtaaaagccaacgtgcatcccggcccgggtgcggaagaacaccagatcgccgggacgtaaatcccgcttattgacccgcacgcccatgtgcagcagctcgcgg

SEQ ID NO: 295 - DNA, 384 bp, Klebsiella pneumoniae
  marker
gtacccttaaaaaaagtgtcgtgatgtggtgcgttgcttgttatggtgattgccgatcaatcctgcagtttttgtgccatcttcccggtgcgtgccgggaacagggttaaatttgttaaaataaagttgcaggattgtcttaaaagggaagataccagcattactggcgaaaccgcagcgcctgagcgcaaaaagacgaaataaatgtcgaggatttgatcgcggcaacaaatttgcaccaccgcagcgcaagcgtacatttcatgcaccactatagtgcgacactaggccccctgccagcgggtaaacaagtcgtgctccagactaatatcaaattgatcgagtacccgattgacggtctggttgatgacatcgtccaggctt

SEQ ID NO: 296 - DNA, 384 bp, Klebsiella pneumoniae
  marker
ttgggattgacgggatatctgaccagtcggggaattaaaaaacaggaaatcgttgaggtcaacagtgctgcggatctgcagaaacactgtacgtcgtgttgcccggcggtggtgtttctgaatgaagactgtttcgtgcatgatgatgaaagtaatggcattattcgccagatcattacgcaaaacccggcgacgctgtttgttatctttatgtcgctggcgaacatccattttgaccgctatttgcgggtacggaagaatctgctaatcagttcaaaatcgataaccccaaaagaccttgatgttattctggttaattatcttaaatacaaaaacaccagtgtagggcagttaactttaccgacattgtcactgagtaaaaca

SEQ ID NO: 297 - DNA, 379 bp, Klebsiella pneumoniae
  marker
aaggatggtctgctgattaagttcgattccaccgcccagggcgcggcggcgaaagaagttctcggccgcgctctgccacatggttatattattgcccttctggaggacgataactcgcccaccgcctggctatcccgcctgcgcgacgcgccgcatcgcctcgggtaagctgccgccagactgcgtttttaacccagtctggtggtttcccgcatttgttactatgcttaaacctgcgggaatcaacgcattcacgttcaccaacgggaacgggtatatcctccgggtatcccctcagacaatggaaggtactatccatgaaacaccgcatcgctctgcttctggtcctgacttcacttagcgccagcgccctagccgc

SEQ ID NO: 298 - DNA, 375 bp, Klebsiella pneumoniae
  marker
gaatggacgcgtgaaaccgcgacgcgccctgtaattatataaggggtagtttagcaaaccgctgaccccgccatttttgcatttgtgtcctcaatgcgccgggtacccgtgaccagatcaatattttgcgtggttcgcggagaaaatggctgcctgccgggagaggaaccacctgcgccgggcgacatggccgaggcagatcaagctttaggcgaaaatttgctagaaaatgttaatgaggcgcataaatacgtacttcccctctcgacgccgcccgccacgctgcctattattctggggtttgcttttttaagacgtttccgaggggagagagaatgcgagctgcgatgttagtaggatgtgcggcgctgttgc

SEQ ID NO: 299 - DNA, 367 bp, Klebsiella pneumoniae
  marker
cccatgcgtcttcaaaacaccacccaaaatctgcattatgagcaagctgactgttggagtgcatgaaaacaataaagttccgttacgctttttgttttttgtctggcaacggcggcagatcgttatcaatcattatatgcccaggttgctaaacgataggtaagtcaataagaaaaagcgcaggcccgtctgaagggtatcgtaacacgccgtttatttcactataaaatccaatgccatcaaccttccccgcgtctcattttcagcgcgcaagacgccgtttccgttcgccttttgtttagccgtcacaacagcagacaaaaaaattgtacgattcctcacggaccggtgctattgtgagctaaat

SEQ ID NO: 300 - DNA, 362 bp, Klebsiella pneumoniae
  marker
tcagctgttgcacagcggtgtgctggcggcgcagaaagcggtgatcttcggcagcttcaccggcagcgcgccgaacgactatgacgcgggatacgatttgccgcaggtctttgattatctgcgccagcagctatccctgccgctgattagcggactggagtttggccacgagcagcgcacggtgaccctgccgctgggcgcccgcgcgcgcctggtgaatcaggcggcggccaccaccctgacgatcggcggccatccggtgctgacagaataaatttcccgaacgcataggcggatcccctgcgaattgttaaaatagtgtcacttttagccattttttcacgccagtcagggagtacgtg

SEQ ID NO: 301 - DNA, 361 bp, Klebsiella pneumoniae
  marker
taccgaaggcgatatggtgaaggccgggcaggccctttaccagatcgatccctccagctatcgcgcgacctggaacgaagcggcggcggcgctgaaacaggcccaggcgctggtggtctccgattgccagaaggcccagcgctacgcgtcgctggtcagggataacggcgtttcccgccaggatgccgacgacgccgcctccacctgcgcccaggacaaggccagcgtggaatcgaaaaaagcggcgctggagagcgcgcgcatcaacctgaactggaccaccgtcaccgcgccgattgccgggcgcatcggcatctcgtcggttacgccgggggcgctggtctccgccgatcaggatacc

SEQ ID NO: 302 - DNA, 356 bp, Klebsiella pneumoniae
  marker
ggcggcatagcctgtccagcccgcctgcagatgttcgccgcggttcaggtcgacggttttaagggtaaaaggcaggcttttttcctgcagagcgacatagacagacatcacgtacggtgagaaaaaatcggcatcggaccacagggtaatgacaggctggctcatagcttcctcaagggtggtagacaggacaataagccaacatagcctgtcttacaggcgatgtcactgctcgagcgcggacgactcgtcgcctggctgccaaaaaaaaaaagggtcgcttgcggaatttctcccgggtggcgcagcttcacctatactcgaacagtttgcgacccacgacggcgggaaatatt

SEQ ID NO: 303 - DNA, 355 bp, Klebsiella pneumoniae
  marker
cagccccaccagcagcggtattatccagcgcagccgcgagcggtagcccggcggccggacgtataccccgtcatccgccccctcaaagcgggcaataaaggcttttcccctgtggctctgcagcagcagactgagcgccagcctgccggccatcaccaccgccaccagaatcgccacccgcgcaggcgcgagggtaaaaccataccctttgagcaccacgccgacgatcggaccaaagacaattaacgcgcaaaggccggccagtacgctgtcgatcagcgcgttttggatagcccgcgcaggctggcgcgtaatttcacccataaagcctccttagaccttggccaccagcgga

SEQ ID NO: 304 - DNA, 341 bp, Klebsiella pneumoniae
  marker
gattttccttcattccatgacccttgtatgcccttcactccatcataaagtgtcggttaatgctatgttgtactaatactttttaacaatagagcgacaaatcagagaacatcgtaaagaaccggcgtttagttgaggttgaagcaccagtgtttattattttttgtatagtccagggagaacctatgcccgccgacgactaaatgccatataattaaccgtatggacgttcaattgaacaccttcggtgaacaggagattcataaatgattttacgtgttttggctgtatcgatgattggttttacgctcgcaggctgcgtgagcagcagcggcctgtcc

SEQ ID NO: 305 - DNA, 340 bp, Klebsiella pneumoniae
  marker
cagaagttaaacaggccgccggtcagaccgcccagccccttcggggcgatatcggagatcagcgtccagccgagacccaccatcccctggccaaaaaaggcaaacgacatcaccaggatcaccgccaggtcgctctccagccagttggcggtgatgatgcagctggccatcagcaggccggcaacgatcggcagcttacgaccgaggttggctgacccggtggctttcagcagcttgtcggagagccagccgccaaacatcaccccgccggcggcggcgacaaacggcaggatggagaagaagccaaccttcagccagggcatatgccgctcggtggcca

SEQ ID NO: 306 - DNA, 339 bp, Klebsiella pneumoniae
  marker
tcgcaacgcaaaggggacgacaacaccgcccaggccatcgccctgcgcgccaccaaagagctggggacgatccgcgacgccaccctcttcgccatgaccccgccgtcggtagacggtctcgggcagagcaacggcttcaccttcgaactgatggccagcggcggtaccgaccgtgacagcctgatgaagctgcgcagccagctgctggcggcggccaaccagagcagcgaactgcagtcggtgcgcgctaacgacctgccgcagatgccgcagctgcaggtggatatcgataacaacaaagccgtctcgctggggctgtcgctgagcgacgtgaccgat

SEQ ID NO: 307 - DNA, 339 bp, Klebsiella pneumoniae
  marker
gatggcggcaaagaccgtggaaacgctggaaagggccagcgctaaagagagagacaacgccagttttttcataactatcctcgacagactgtcattctaacgggtttattagaactatttacgccagttatcgtgccattattcgccccttaagggcaaagatttatgcaccagaaaggccgattttttgcatcagaaacgcttaactatgcattttttagccaaaaaactggctgcttttgcactgaaatgatccatagcgcgtttagatgcacccttttggggcatggatacgaacctggcggcaggcccaccccattgtgcgggcctgcagcagtc

SEQ ID NO: 308 - DNA, 337 bp, Klebsiella pneumoniae
  marker
gtcgagcccggcgatctccagtcccagtcgcgcagtgaagcgctgaagcgcatcggaaaatcgcgagagatccgccgtaatatcggccagttgttcattttgctgccagtttgccatgggtttgctcgtcaataatgctcgtcagtaatgaaaaggtaatttaccgtgtttcggcctgcggaccaaccgccgccccgctgatgggcaactgaccggcgatggattgcgcacgccggcgcgccgcgcgcaatgctgacggacggggacaaatgcagtatactcccgccctaatttgtccacattatggcgccgcctccctcgggggcaggcgcattac

SEQ ID NO: 309 - DNA, 336 bp, Klebsiella pneumoniae
  marker
ggccagttccggcgcgccccgttcggtaatgctactttctgtcattgttatattgctccagcaaagactgcaatctgtcttgtcgggcgtaccacgtcacgcagacaaattaattagtaaactaaatgttatataattgttatatttttatatgtgattggattcacattttttttcgcaagcacggattttcgcgatcatcgccagcaaaaaagcaggggcagggaaaaagtggattatggcgaagggattgccatgacggggttttattttgcgttgaaaggagataatggagcgaacatggcgtaattttcgccggaggcggtgctgcgcact

SEQ ID NO: 310 - DNA, 335 bp, Klebsiella pneumoniae
  marker
cagcacaaccgcgatggccaggagggataaaacccaaatcaattcaccgttcacaacgtttccttgtcacaagtgggagtcgacatagtggcataaaaaagccccgacgacgcggggcgaaatcatgggtttacgctttaagacgcacatttaccacgccgtcagtctggcgttcaaccaccagatcttccaggctgctcagcacgaggtcggcttcatccaggcgaggggcatcggcgggcacgttgaccgcgatagtgcgacagccggccgccagtccggagaggagccccgccggcgcatcttccaccaccgcgcactccccggcaggcaga

SEQ ID NO: 311 - DNA, 332 bp, Klebsiella pneumoniae
  marker
gcgtcgacggccaactgcgcggctacctgtatatcattttgcagggggagacgtttaatcagctggcggccgacgcctggcaaaaaacgctgtggagcattgttctgtggacgctgctgctggtggccctgtttggcctgctggcaggggggctggcatggttctgggtcacccggccggtccgcctgctcaccgcccaggtggcggcgagcggccaggacagcatcagcgccatcaaaaccctggcggcccgcaggccggagccccggcctggtaacgaggtggcggtgctcgagaaccgctttattgaccttgcccggcagattgccgat

SEQ ID NO: 312 - DNA, 332 bp, Klebsiella pneumoniae
  marker
tttcacgcccgatagcgaggaagctccgtgggccagatgccaactgacgcgagcagtttccagcgcggcgataatatcctggcggaatggacttggctcttcgagcaggatcagggggatagattcccccttcgccagcacatattccgctgcacaataccagagagtaggtgatgttctcagggtgaaagaggtaaagccgggaggctgatgggtggtcaacgccagatcgaccagcccctcggccagcatctccatgatggcggcatgggggtgaactttgatctccaacgtcattctgggatagaaacagccgatgcggtttaacaaaa

SEQ ID NO: 313 - DNA, 331 bp, Klebsiella pneumoniae
  marker
ggcgaaaaaagcttagcgtctcaggcgataaactgctgccaggcggcggagaagggcatcaccagtattagcgagggcagcatattggcggtagggaaggcacggatcccgcacagacggaaaccggtcgccagcataatgatgccgccgcaggcggtgaagtcggcgatcatcgacggattgattaacgccatgataaaggttgccgcgaaaaacaggataacgaaaacaatcagctggggaataaagatcacggtgatgatataccccagcgtggaggcgaaaatcgcggcagtaaaaaagtcgaggatcgacttggtcagcagaatgg

SEQ ID NO: 314 - DNA, 329 bp, Klebsiella pneumoniae
  marker
accggtagcgcgcgttagctgccgcaaatacccgctggttaagcgcctcatcctcggtggccgcaatcaccagaaagacatcatccaccagcgagtcgctgaattccgtcgcccgccagctgagtgcctggcgcgcagccagatcggccagcgccggtgacagcgtttcagcgaccacctgcacctgcgcctgggcgcgcagcaagaacttgatcttacgttcagcaatctcgccgccgccgatcaccagcacgggcctttgtttcagttcggcaaaaaggggcaagtaatccacggtgcaacaactctcttacattcagcgatactgc

SEQ ID NO: 315 - DNA, 328 bp, Klebsiella pneumoniae
  marker
gtcgagggcgtagacccgctcgccgaagcggaacagggcaatctgccgctcccctaagcgggcgccgatccccgcctgcgccggaatggcgtcaaggtcgcataccgcctgccacggtcgggatgggagttcgccttcgggcaacgtctcagtcagcagcggctgcggctgaccgcgcagatcgcggcgctgcacagcctcgtcgggctggtcgctattaacgaaggagcggaacagcgccagacgctgcggatcgttgagggtggtctgccactcgcactggtagctgtcgacgatccgggccatctcctgctccagctcctcgcca

SEQ ID NO: 316 - DNA, 326 bp, Klebsiella pneumoniae
  marker
ttcgctgctgattgcccccggggcgatcgcgcttctgctggtgagacgctttatccacgccctgctgctggcggtagcggtggccatcggctgctcggcgggaggggtgtggctggcgttctatctcgacagcgcgccagcgccgactatcgtagtgctgtttaccgcgctgtttgtggtcgcctttgtcgcaagcacgatccgcgatagtcagaaacagaaaacttcagcaattatccccggtggcggctaacgccttgccggggctacaagagcacgacttgtcgcccggctgcgcaaagcgctgaccagggaaaagcagctac

SEQ ID NO: 317 - DNA, 326 bp, Klebsiella pneumoniae
  marker
gctgacaaagagcgcctttaagctgcgcaagaggctgattttaccagaaaacgcggcaaatgacgggtcttaccagaacagaaaaaaacaaggatcttctatccacatggaagattaggtcatcaaattaatgccaggatcgttgatctgtttttaagtggttgataaatagtaaataatactatttattcatttattttcaggggcggataagctgacgttgtaaaactatgcacaaagttatccacaagctaagttgtcgcgcgatcgcgacgatcgttgaatcttttccgcgaattgcgggaaaaattcaggatttcatgccc

SEQ ID NO: 318 - DNA, 324 bp, Klebsiella pneumoniae
  marker
gtacatgctgaacgctgtcggggagttcttgtttactgcgatagggcatactgacctcctgtttgagcattaagtttaagcctggtacgcattcggctggctatcaaggtcaaaatgagtagaaaaattattttagtaattatttgaataataagaactaaatataagtaaacataaattataataaactaatcaagatatccatcgatacccgtaaatttaagtaaaaaaccagcggtaatttagcaagatctgttactttaccgccctacgtttttataattataacacctgcataaatggagatggttcatgacccatgca

SEQ ID NO: 319 - DNA, 319 bp, Klebsiella pneumoniae
  marker
ctaatattgaacaatgacaccggcagcgccgacaggccgatggccagcagccacagcgcgttgacgccccccacccgtatcgtcaggtggagaaactgcagcatgccgccgtggatccgctccggcatcagcagcgcggcgccgccggcgaccaccagcatggcgctggccaccgcgccgccgatcccggcaatggcgccgctgagcggtttgcgcatggcaaacagaaaggccagtacggcgctggcggcataccacgccaccgcctgattcactaatccaattacactcattccctctccccctgttgcgcctggaa

SEQ ID NO: 320 - DNA, 319 bp, Klebsiella pneumoniae
  marker
tatttacgcctaaacccccccttttctgcgcccccatttcaacgcgcggccgccaaaaaatgaaagcgattacatagtaaagactgtcaccttctgcccaaagacgctatctcctgtacccatttttcacaatgttacatattgtttcggtcaactctgattaccgtttttcaaaatgtcgtctatccttgtttatattgctgatttaaaaagcatttaatgaattacgtttctttacctttgtggaaacgattacacagccgtgattatagtcacgtttttttaccgacgagtgtcctaccctaaccatcgacagaat

SEQ ID NO: 321 - DNA, 319 bp, Klebsiella pneumoniae
  marker
cgaaggttttcgaaagagacgatctttgtctcacgaatacagaaaagcaggaccgaagtcctgctttgaaggcatatcacgaaggggtgtactgcagattagaactggtaaacgatacccacggccgcctggtcgtcagtggcgacaccagccgctttggtgtaatcgttgtcgtccagctggttgaatttatacgcagcgtagacgttcatgttcttgttaaagtagtaccaggtacccacttcgatgtatttaaccagatccgcatcgccgccggagaagccagcacgcgactgcaggtccttgacctttggtctgt

SEQ ID NO: 322 - DNA, 316 bp, Klebsiella pneumoniae
  marker
gccactccaaaccgcacaccaaagggttcttcggcgcctttaaccgcctgtgggggcgcacggaggcaggctaccagcaccgcgtactcggcggcctgcgccggggcgcagtgatgatgggcgcttacgcgctgatttgcggggcgatggcgctggcgatgtggaagctgccgggcagcttcctgccggtggaggaccagggggagatcatggtccagtacaccctgcccgccggggcgacggcggtgcgtaccgccgaggtgcgccgccaggtcaccgactggttcctcaccaaagagaaagccaataccgacgt

SEQ ID NO: 323 - DNA, 315 bp, Klebsiella pneumoniae
  marker
cgcgtacacatagcccggtccatgacgcgtgcgcagtgagtaaaggatatcggaatagctggcgcgcaggtcctcttcaacaaagctaccggagaccagctgcagcgaatccagttcgcagatcgccagaaacggcgcggggaggtacaactgcaaaaaatccttcgcgaccgcctgatgcatgagcatctggcgaaacaccgcgtcgtgtggggtttgactgactttttccatcaatattgtctccagtggcgtcatgcgcagaggaccagactgccagcacactgccggagacaacatcctacttctctgggt

SEQ ID NO: 324 - DNA, 311 bp, Klebsiella pneumoniae
  marker
gtcttctgtgaacggcaggtagtgcgttatcgccattaaccccgcgccgctgagaaacagcagcgtatcgctgcagtgcggtgcaattcgcacccaccgctggttcagcagcgggctctggtgatacatccaccagtaacgtaaaacgaacaatcctaccgacaccgccactgtggcaatgtgcaggtagaggacagccgtgaataagttcatcagccaacattctccatgtcgggtaaacgtccgagggtcagacgctcattgtcgccatagtcgcgacaggtcgcgacgtccagatagcccgcttcgcg

SEQ ID NO: 325 - DNA, 308 bp, Klebsiella pneumoniae
  marker
gtcactgccagaacacacgcccggtcatgccgggcgtgagattcatgacaaacctcatgcaatcattgtacttgcagattgcaccagaaaaataacaaggaaaatcaatttattgattttcggctgataaccaccagtaaggaaaaatcacgctttttccttactggtcagcaatcggacgcccggtcatgccgggcgttttcttttgcgcgcgctcaggccaggcccggcgtcggactctcgcccaacagcgcgcggacgctggccaccaggtcatcgagactggcatcgtgcatgcccagcttgcg

SEQ ID NO: 326 - DNA, 305 bp, Klebsiella pneumoniae
  marker
agatcaacttcgaccttgatagccacaacttcgccattattcccggcgtgcgcgtggtgcatcaatcgactaagccggaaaatctgtccgaccttgccgccaacagcagcgtactgagcgaatcgtcggtggcgaatctgtacggcaaaaacagcgatacccaggttctgccgtcgttgaccttccagtacgacctcaccccgcgcctgatgacctacctgcagtaccagcgcggggcgcagttccccaacgccagccagctgtatggctcctggaacctcggctccagctacgccggcagccag

SEQ ID NO: 327 - DNA, 302 bp, Klebsiella pneumoniae
  marker
gaccagctcctggttgcgggtcatgtgcatggcgcactgcttcagatccagtcccgccggacgctgcgccgggccgccaatgacgtacaggccgcaggaggcgttatcggcgacggtgtcgacaaagccgattgaccagtcgcgaatgcggctgcccaccacctcaagcgccggcaatacccattcgatggcgttatacagttcatcaaaagtggtatcggcatgcggcagatcctgcttcagcaccagggcgatctcggcctccaccttgggctgcagcacgcggccaaacggcacctcgg

SEQ ID NO: 328 - DNA, 301 bp, Klebsiella pneumoniae
  marker
aaataccgcgctacgtcaggttcgggaaaactgtagcgacagtaaactcaaagccgatcataagcaaaaaattgccaaacagcgggaagagatcgctgaacgtcagcgcgatctgcaggaagcccggaagaaaggcgatgcggacaaaattaacaaacgccagcataaactcaatgaagcgcaacaggagttaaaaacgctggagtctcgggattactaatcaccattaactttcgcaacacggaccacgctacaggagaacgacatggctaaagagaatgtgactgacgaccttcgtgca

SEQ ID NO: 329 - DNA, 301 bp, Klebsiella pneumoniae
  marker
gccatggcgggtgtgctcctcgctgagcagataaaaggccacggtatccgggtcatagacgtaaaaggcattcgcgcaccacagctcgtcttcacgggagacgcaccaggtgacgacgtgctgtttactcagccagcgaccaatggcggcaagcgtatccatctttcttctccattatgctatggtgcacacaccttaccatagtgactttgtgaccgtgtgctggtttctgtatctcattcgaaccgcggataatcgcctttataccggcatcaccaccgacgtgccacgccgctttcgc

SEQ ID NO: 330 - DNA, 298 bp, Klebsiella pneumoniae
  marker
aaaaaaaagcagcctggcggcctcaccgatggcgacggtggggatcctgtttgcgctggcggcgctgctgctgatgacctttggcgcgctgtggcaaaagcgcagccgtcaggcgccggcggatgtcctgccgctgcagtatgccgttagtctggggctgtgcctgctgattgccccggtcagcggcttccagtttaccgttaacgccgggttgattattccggtgctgtttctcggactgctgatttcggtggtcgcccagctactgctgtaccgtctgctgagcgcgggaaatatc

SEQ ID NO: 331 - DNA, 298 bp, Klebsiella pneumoniae
  marker
tcagcacggcgataaactgattcataaaatcttccgcaccgacgctggcgctggactgcgccggaaagatacgttcaatggggctgcgcagcgttgttccggctcgttcaatccatttttcaatattcaacaggccgccgataatcgtgccgacaataatagccagggcaatcggcggcaggttatgcaatttattgacaaagaatatgcccatactgattgagatcagtccggcgatcaacggtaaggtttttttgaaatgttccggaataaaacgattcagtgaagcgcccgccag

SEQ ID NO: 332 - DNA, 290 bp, Klebsiella pneumoniae
  marker
ccaacgactgtatggggtgctaaatcagcgtctgggatgcagcccgtggcttggcggcgaccactacagtatcgccgacatcgccgcctggccctgggtgaactgccatgtccgacagcgtatcgatctggcgaactatccggcggtgcacaactggtatgagcgcattaagcagcggccggcaacggcggaagcgatgttaaaaattcagctttattaaccccctgctcgcccgtcgcgctttgttgtatgattgcaggacttacaccacggaggaagcctgcaatgtc

SEQ ID NO: 333 - DNA, 289 bp, Klebsiella pneumoniae
  marker
acgtctgtggggaagctgaaagctgcgccccggcggtcgggatctgctgctgcaggtgagcgtgggcgaaggcgcccgccgcggttaacatcccggcaagcgcaacggagaggcgcaacgcgcgtccagcaagaagtcgcatattcgtcattcccttttgttatgtctgtagcacagagaataaccctgtataatgccagagtcgagccaggcatctgagccctgaccggatttataagcagagtggagtggatgatggaaagaaatctggccaaaaatttcgcaagat

SEQ ID NO: 334 - DNA, 289 bp, Klebsiella pneumoniae
  marker
gagggacattttaccccgatgcaggcgcgctgggatgtgaagggcaagcggggagtggcgcgacaatgctattaccctgagcagcctttccaccggcttcgataagcttgagtacggcacaatgcgggtcagcaccccgcgtctgaccctcgagcagccgatccgctggctgcgcgatgctgagcatccgcggttgaccggcgcgctgtcgctggacgccgccaaaaccaccttctccggcggcagctatctcccggcctcaacgctgaaattcgctctcgacggtcgg

SEQ ID NO: 335 - DNA, 286 bp, Klebsiella pneumoniae
  marker
tgcctccatcttcacctatttcgtgatcttcgttctacaacacgatccagcgatggtggccgggctgaacagcctgaactcgattctgcagctgatctctacggcgctgtttatcggcctgtgcgtgaaaaagggcttcagcaaaccctatatcctggcgctggggatcgtgattttcgcggttctgctgtatacctcgctgtggtttttccatctaccgtccggcctggcgacagtgctgatgttcggcattaccgtgctgttcggcctgggtaccggcggggtt

SEQ ID NO: 336 - DNA, 286 bp, Klebsiella pneumoniae
  marker
tacccgcgccaacaatccgggccagttcacgaatgtgccgtcgaacatctacaccatttatcaggcggaaaaccgcgataaagcctatatctacggcagtgagattagcactaaatttaactttggcacctggtttgagcaggtggacggcctgagcgccaccctcgccctcggctatagcgaagggaaatcgaaatccagctacagcggcgataaatacgtcgacctggacagcgtggcgccgatgaaagccatcgtcggcgtggcgtgggacgatccggcgaaa

SEQ ID NO: 337 - DNA, 283 bp, Klebsiella pneumoniae
  marker
cacctggccgtggagcgaggccaatccgctgcagctcagcgacgtcagcgtcgatctgttaggcgggaaactgacactgctgcagctgcgtatgccgcagcgcgacccggcgttgatccgcctgcagcatatctccagcagcgaactgaccagcgccgtcaaggtgaaacagttcgccatgtccggcgcggtgagcggcgcgctgccgctgtggctggagaataatcaatggatcatccacgacggctggctgcgcaatgacggaccgatgaccctgcggctg

SEQ ID NO: 338 - DNA, 280 bp, Klebsiella pneumoniae
  marker
ggcggtagggctggggatcacgctcggggcgattggcattcgcctgggcgagcaggtcggcgactggctgcatcttactgaactaccggggatcagcttccgcctgtcgtttgtgtttatcgccttgatctgtctggtagggatgatcgacagcctgcatctggccaaaacggccggcagcagcgtgtcggagaagaagaaatagaagaaaaaataaacgacggaagggccagcggcgctggccctgatgacggttaagcgacgatctggcgaacaaagt

SEQ ID NO: 339 - DNA, 276 bp, Klebsiella pneumoniae
  marker
ctcctgcatgaacgcggtaatcgcctcccctttgttgacgccgcggggtttaatctccaccacgcacttgccaagctgtaacgccagcagcggatagcgctgaacaatccgctgcgccagctccagcacggcgctctgctgctgcggggcctggcgatagtggagcgcgaaagccatctctttactctccagctcacatcccgggagcgcttccagcgccgacgtcagctcagccgcgatctcatcgcgcagcgctgtcggcagagagacgatgta

SEQ ID NO: 340 - DNA, 274 bp, Klebsiella pneumoniae
  marker
gacagccaatggtgcggtttatcggcggtgacgatatggcccataaccgggaactgtttcgcgtctggcttcagaccctggcgaagtggcatcagtcggggaccccgtggttgttcctgcataccccggacattgctttcgccccggcgctggtggataccctgtggggtgacctgcgcgctgccctgccggcggcaggaaatgcgccgtcgattccgcagcaatcttctcttttctgatatcctgctatcatatccggagccatctgccagag

SEQ ID NO: 341 - DNA, 274 bp, Klebsiella pneumoniae
  marker
ctgcgggtcgatgatgccctcggcgagacgctgcggatccagcggctgggccagcgcctggtcaattagcacccgggcctgaacgtcaatattggccgcccgcagctgagtttcaatattcgcccgctcgtggtcatcaatatgaccgtcgcttttcgcggcaaataccagggccgtgatcagccgcacgctgcgcggatcgacatccgtcggcgccgctgccgtctcaggcgcctaaagggcggacgtattctgcgcgcgcattttctgctga

SEQ ID NO: 342 - DNA, 273 bp, Klebsiella pneumoniae
  marker
tgggacagatttcggattcaaagggatttcgttaatatattaatgatcatcttttatgctttgcgctgaggtttagcaactggaagtgaatgttttgtgatcggattaacacaatatttacatagcaattacttatttgttgaaaatcaataacttgaatatttttcaggaaaagactggtacttttcaggtgcagaaaccggttgtacatggcaggattaacgctaattattaagttattaataagtttttggtgaggctgttgaggggata

SEQ ID NO: 343 - DNA, 272 bp, Klebsiella pneumoniae
  marker
tctcaccgccgtcgtcatttacggcggcacaaagctctccggcagctaaacaaaacctcattgacgcgaaaaatgggtgtcctgttgccaacgggtttcgatagaatcaccgcctggagcggcagggaaacagcaggaatcggaatatgaaagtgaagggaaaacgcaggaccgtctggtggctgttggcgatcgttgtgctggggctggctatctggggatggcggatcctcaatgcgccgctgccgaactaccagacgctggtagttcgc

SEQ ID NO: 344 - DNA, 268 bp, Klebsiella pneumoniae
  marker
gaatatcgatatcgagctgatgttgtagcaggagtcggcccgcttgccaacacccggggcggcgggcgcgccattttattgcgcgggatcgggcattctggagagggaatgtgacaaaaatatgtcagatacatttaaatacccttttttataaaaagttccatcttgtcataaatatttaatatcccggcgttaaaaaacctccagtttttgatgggcgagcgcccgcaattgaatagcgcgtataaataaatcaccaggactgaat

SEQ ID NO: 345 - DNA, 266 bp, Klebsiella pneumoniae
  marker
gtggcggacatgaccgccaccgtcttcagcccggagctgcaaaattccgcccgccgcgacggccaggaaatccagcttaaagccctgcagcagtactggcagctggcgctggcccccgggatgcagcgcgcagtcaatcaggcggaagtggcccaggatgtcgccgactttgtcgatcgtatcgaccagttggtcaccgcattcgaccacaccaccgagcagcgtatcgaacgggtggtctggatctatcgcatcctcgccattgg

SEQ ID NO: 346 - DNA, 266 bp, Klebsiella pneumoniae
  marker
ctgccgagaatttgttaacgacggcgtcgggtcccggatagcggctggcgccttatccgggctacaaaactgcgcgcacatgtagcccggctaagcgcagcgcgagccgggaaaaagccagcgtaattattttgcccaaaccagcgggcgcccatggatgggttaaagcggcaataaccgctttattaacatactattatttgtaccatcattttcttatgcgccgcgttgtcggcgcgttttggacgtaagcaatgtcgtataca

SEQ ID NO: 347 - DNA, 266 bp, Klebsiella pneumoniae
  marker
aatggattttgttgtcctagcactgggtaaaaaagggcgctgcacctctgcagcgcccgattttcctggggtgaggctgccttgacgttggcaataatgcccggtaaggtgcctttcgtgcgccagaagtgcatatacatatcattccgctcaatgcgtagcgcggttagcgcgaacgttctcctttgccgggcaacatctcggtcgtggcgagcgatagcgagctgatacctggcatcgcgcaaagcggaaaaagtatataacga

SEQ ID NO: 348 - DNA, 264 bp, Klebsiella pneumoniae
  marker
tggaaaaagaagaataaaacaccgcctgacgctgtggcacgagtcagtaggctaatagggtgcgttagggttggttatcagaaacctctacaaaccgcgataagtagaccacagggaacgagaaaagtatcaggagggaatgtgatccagccaaacatttacaaaacatttggctggattggcactatttgcttagggaaataaccaggggcacgtttcacgccgcaggtttcaggcgtgcgcctcgttatataccgtgctttt

SEQ ID NO: 349 - DNA, 261 bp, Klebsiella pneumoniae
  marker
gctctgaagcatgccagcgcgaccgaagtgaccgtgacggtgtcacaacgcgataatcaggttcgtctggtggtagcggataacggccgcggcgtaccggaccacgccgaacggagtaaccattacggtttaattattatgcgggatcgcgcccagagcttgcgcggtgactgtcaggtacgacgccgggaaaccggtggaaccgaagtgatcgtcacgtttatcccggaaaaaacgttttccatccaataaggagaccct

SEQ ID NO: 350 - DNA, 261 bp, Klebsiella pneumoniae
  marker
cggtatccaggacgggatgaggaagcagccatgaatgcagcgcaagcgggactgtatgtcgaccagctcaccgtcacctggcgtaacggccacactgccctgcgcgacgcctcgttcagcgtgccgcgcggctccattgccgcgttggtgggggttaacggctcgggtaaatccacgctgtttaaagcgctgatgggctttgtccgcgttggtcacggcgagatcgccatactcggccagccggtcaaccgcgcgctgcgc

SEQ ID NO: 351 - DNA, 255 bp, Klebsiella pneumoniae
  marker
gccgccatcatcctttcgctgcgcattatccctgatattcgcgaaacggaacggcgctccttcgatctcagcggatttatcactacctcggtcgcgatggtcagtctggtgaccgcgatggagcggctcggcgatcgccagccgcagatctggccgacgctggctctcgccgcgcttggcttcggctgtctgttatattccattcgtcatttccgccgggcggcggcgcctatggttcgtctcgacgccctgcag

SEQ ID NO: 352 - DNA, 253 bp, Klebsiella pneumoniae
  marker
acgctatcgtcgccggggcatcggccagcagctgctggtctcggttatcacccactccagcgcctggttcgactttctcaacacccatgccccggcgcaggcctggcccttttatgaaaggcttggttttcgcccggtgtacgatgaaccgcgggtgacgcatcgcctgttttgttcgctttaaaacccccgctggcaggcagcgcgggcgcgtgttacattccggtgaccttcactgttgaacctgtctgcg

SEQ ID NO: 353 - DNA, 253 bp, Klebsiella pneumoniae
  marker
ccagcgaagtggttatcttcttccggagtcatgttgtaagtctgggagtacatgacggccgcatagatgttgttagcgtcatattttgcagaggtcgcccaggcttcggctttgtcgccattgccgtcagctttctgatcgacgctacggttagagctggagtagcctgcagacagtgcgataccgttgtcgaacgcgtaggtggctgcggtgctgaagccgtcgccattctgcttgcgaatcgcacggtcat

SEQ ID NO: 354 - DNA, 252 bp, Klebsiella pneumoniae
  marker
ctaagcgcgatgcggcctacgggccgcatttttgtttccagtagccaccaaataatgccaggaaatgagaggcagatcgcactacagagcacttttttggctacaaaaacagcgttttatatcgccatgcggccagtttatccaagaaaaatcgagaagttttatgattttataaatggacacaaattatccatcatccattaaatcaatgattaatataagtatttattcatcccttttacgctagtcccg

SEQ ID NO: 355 - DNA, 249 bp, Klebsiella pneumoniae
  marker
accagagcatcgatgtggacagtaaagccagggattattatcagcgtttttaccgcgtggcgtggatgccagatgcccgctaactctcagccctggctggtgcagggaagcctggcgctggcgacgctggcgatcgcggtcgcctcgctctgtttcggccagtacccgttaagcctgagcgccgttggccacaccctggtccatctgccgccaggagaaggggtgatcgggcagatcgtctggtcggtt

SEQ ID NO: 356 - DNA, 249 bp, Klebsiella pneumoniae
  marker
ttatcgtcctgaaagagcaactgatgccgctgcgcatcgtggccgcctgcgggattgccgccggggcgatcctcctgcgcctggcgtagcctgagatggcaacattagttgccgttcctgtttacataatctgcctggaattccctcaacaatcggcactttgcagttgttctgtcattttaatatggtagattcctccatcgtttacgggatgtggtagtcacatattcttcatttctctttactcac

SEQ ID NO: 357 - DNA, 244 bp, Klebsiella pneumoniae
  marker
aaaaaaaaggattacatagacaatccagctgagcatgcggtttatcagctttagcgcggaggagtgacgaagaggcagtaaatagccgacgaccagcggcaacagaataataaagagtcccgaaaacatgaacgatgcagcccttgcatgatgagaatagcgcccatgacactacccaaatcaccgggccgagtaaagctgtcgccagaaagaaaaagcccggagacccgggctttgaaaagcg

SEQ ID NO: 358 - DNA, 243 bp, Klebsiella pneumoniae
  marker
gagtaatcgcctcgcgggccgagaccagcaccccataagagggggttaatcccccttcctgcggcgcggcgcagagctcaatacgatcggcgccgcagcgctcagcctcccgggcgcacgccacgctgtagcaacacacttccagtaccgccattcctctctccctgatccagacaacctttgcagcatgtcacaatttcacgcggcagacgccgcgcggcttcacactgttacgtatcggct

SEQ ID NO: 359 - DNA, 241 bp, Klebsiella pneumoniae
  marker
cggtacatctgaccggtacggtggcttccgcggcgcaggcggagcgtgccgcagagattgcgaaagcggtctccggtgtgaaaagcgtgcgcaacgatcttagcgttaagtaaaccgagttattaacaaaagtgttgtctggccaaggttgccgaacgaatagcagcatccactgagcgatgagctatacagaaagggtgcgcaaaccgctgttcaccgtccattatggtaaggagaaaag

SEQ ID NO: 360 - DNA, 241 bp, Klebsiella pneumoniae
  marker
cagacgcagcagcgtcagcaagcttagttcagtcagcgttcgcagacgcagctcaagctcatcttcagggtaaccgcccggcagacgattgttcgcggagacagagagaaatccctgagcatggtttggcaacgtcaggcactgcgtcacgcccttttgcagaccatggtcacgcgccccgtcccacagtgccggcgcatcacgaaacaggctgtcgttccatggcagatggccacgcata

SEQ ID NO: 361 - DNA, 237 bp, Klebsiella pneumoniae
  marker
ccgggcgagtccgatcagctggcggcgctggtatctcagcagcgggtggtccgcgaagcgaccatcaacgtaaatgccctggcggcaaaacagaccgccagcgatgaggaaatcaacgccttctggcagcagaatcaggcccgttttatggcgccggagcagttccgcgtcagctacatcaaaatggatgccgccagcatgcaggagagcgcctctgacgacgagattcagtcatgg

SEQ ID NO: 362 - DNA, 232 bp, Klebsiella pneumoniae
  marker
tagctgtcgcatttattagtctgaaggcttgccattttcccgctcgccgcacagaaacatagcgtttttctcccatcatgttctacaccctgccaagggcgatgggaagcggtgtatacggccgtgggagtcaatagcgcaaagacgtgtcgcggggagcgttaccccgccgcgagagtgggctaaacgcggcggctcccgcgaagctgagccgccgcgccagcacaagctt

SEQ ID NO: 363 - DNA, 229 bp, Klebsiella pneumoniae
  marker
gtaccgcgcctgctctcgctgcgaggtcgcgcatggcacgccttcggcaaaaaagggcggattactgattatcagttcatagcgtcgagtttgcgacggctgccactgatgaatatcggcctgccagacctcaatccgcgaagcccacggcgacgcgagggcgttttcccgcgcctgagcggcggcctcttcgtccagttctaccgcctcgacatgcacatcatctccg

SEQ ID NO: 364 - DNA, 229 bp, Klebsiella pneumoniae
  marker
cacccaagttgttgatttgatcttagcctgggaataacgaaatcgcggggctcctattctaccggagcgacaaaaatctgacgttaccatttttgcgatttcagagtatgcccagccagacggcagggaaagccgctacgctataactatacagattgatagcgagggccacgaaatggatgaactagacaataacaaattaaaggcagaggatgacgaaagagaagtg

SEQ ID NO: 365 - DNA, 229 bp, Klebsiella pneumoniae
  marker
aatgtccccaaatcttataggtgtagtatagacaaggtctcttctgcggagtgcgtccacgatcacattagtgaacagcgaatagacaaaaatttacaaataagtctatgaaccatatcaaattctaatgatttagtgagtaaatcatcaatgcgggtattgtctaatagccagaattttgtcaagcgcgcccgcagacagtacactacgcggcagagaatgccccatg

SEQ ID NO: 366 - DNA, 228 bp, Klebsiella pneumoniae
  marker
cgttctccgttggtcagcgcgtggccattgccggcagcggcagccaggtcaccgtctctccgcgataatctcccttacgatgcggccggttgcgccgcatcgtatttttcagccacgtttatttcgccgtaataaattcgtagtaaccatcagacatcttatattttaatattccatgaatcattgcgcctgcgcaatatcttatctgcccgcccctattaccctcaa

SEQ ID NO: 367 - DNA, 228 bp, Klebsiella pneumoniae
  marker
ccgcgaagtttaaacaaaatgtgaaggctttgcgccgctgaaatagggtaagcttgaggcagcatgttttgttattggtggggggaatctaatggccaaaaccattctgctggtggaagatgacgaggatatagccacgctgctgcggctcaatcttcaggatgagggctatcagatcgtccatgaagccgacggcggccaggccctcgcccggctggagacgcaggt

SEQ ID NO: 368 - DNA, 228 bp, Klebsiella pneumoniae
  marker
ctcgtcgtgttcggtaagatgttgagacattaattactccttttttcaggagcgtaatagtaccctaaatcgttaacgataataaaacctgccgtcgcaggtttttttatctaccctactggctggcgggtcgtctcctgccgctttgcacaggatcacactcttgatggcagtgacaacatgaataccgcgatctcttcccgcgatgaacgtgctttttcagcgccg

SEQ ID NO: 369 - DNA, 228 bp, Klebsiella pneumoniae
  marker
gggcgccaaacggcaggaaatatcaggtttcgccgcctgcagaggtaaaaaaaacgttagctgaatgctttcaggaacaacgtcatttttgtttaatctttatccctttttttgatcaaaatcagcatcccgacccgcgccgtttggtgtgatgcacagagcaaagtgtgaacaatatcacgcgaggactgggtgggcaggatgctgtagcgggacagaaacggggta

SEQ ID NO: 370 - DNA, 227 bp, Klebsiella pneumoniae
  marker
tagtcgtgaaagttaacgcgcgactcgcactgttctctttgatgcggtgttaatctccccgacccaaccgcatcgccctcgccgccggcatctgccggcggtttttttatctgtcggtggttgcgctcccgccgggcggattgcacactggtcgcccgttaatcgtcatggctgtcttatgtcttcgttaaaattctccgttagccgccaggaagcgctccttatca

SEQ ID NO: 371 - DNA, 226 bp, Klebsiella pneumoniae
  marker
gctggcgtcggtgaaaacgcaacatgccgatttcccgaatctcggtaaacggatgtcgccgtttgaacgcaccccgccgtggtcggtctacgtcccgccgcaggataaagtcgaggtgactgccgattccgatctggagctggcggtatgcagcgcgccgggcaaaggcagcttcccggcacgcctcattcggccggaagacgtcggggtagagcaccgtgggaaa

SEQ ID NO: 372 - DNA, 225 bp, Klebsiella pneumoniae
  marker
tcgtgtttgatgttgtgctggcttcgtctcgtggcgaagcctgagtgcgtgcttaagaaaatgccgtaaagggggagcaggcgcaagggttttgcggccggaaaaagaaaaaacgcaaccgtgattgttgaacagtgaaaaaagagtatcttttgaacggctttattgaggaattcgtatttataggccgtttttattagatggggtaattctgatggccgctag

SEQ ID NO: 373 - DNA, 225 bp, Klebsiella pneumoniae
  marker
ctctgtggccaggtccgctactctgcagcctgacgtaacgtcagggtcaagcaaaaaccgcgcttgctattcattttatgctggcaaccatagcagcacgaaggccaggacggaatgggggcgtaatatggcgggaaaaagaggaagagataaagtgagacacagaaaagcgacatcggccttcagcggccgatgcgggaaatcatgctacggttagctgtgacg

SEQ ID NO: 374 - DNA, 224 bp, Klebsiella pneumoniae
  marker
taaaaagtcaggccagcgccgccgcggtgtggatccggcctaagcggatcgcatcgagggcaatcatgcgctcttcattggtaggaataaccgcgcagcgcacccggctgccgtcggcggagatcaggcgctcgccggccgaattgggctgctgattgcgggcggcgtccatcgcaaggccaaagaccgccagccgctcgctcaccagccgacggatcagcacc

SEQ ID NO: 375 - DNA, 219 bp, Klebsiella pneumoniae
  marker
agcgtagtttccggttagcgcaggcggtacagatatctggttatccaccctgtttcctccttatcatggccagccgaagctggttgttaattatatgtgagccatgtaagtatagacagtgtgaccaacctcgccatttttgatagttaccgccagcgaaacgggcgctggcggcaattactctgtaaactaaaaagttcggtttaaattcaggccgca

SEQ ID NO: 376 - DNA, 218 bp, Klebsiella pneumoniae
  marker
ccgccggccatgggccacgtggtgctggacgttcagacgctggatggcataggcggcgtcggcattgtcgacgccgagaatatcgcgcagcggggcgatcgcctggccgctctgttccgcgtcgcgcagctgccgggccagcgcgtcaagagaaaaagtcatcatttactccttaagcccgtgcgaggaaattgagcaccagctgattaaaactgtcg

SEQ ID NO: 377 - DNA, 218 bp, Klebsiella pneumoniae
  marker
tgcagcaaaaaaccgtttaacttctccaggcggagataatccttttcatctccgccaccgctgcgccattcacggcgtagcgtctgtattcatcggcatcgggatcggctgacatcgaaacgcccggatgacgaaagcgcatttccgacggcaaccagtggccagccgagctatggacctctttcacccccgcctgcagaaacagcggcaggttcgcg

SEQ ID NO: 378 - DNA, 218 bp, Klebsiella pneumoniae
  marker
tgcgcgggggtaagtcgactggaacgtaacgcgggggcgggtgaaaggcaccgggtggcgcacacaaagcgtgtagtaatcatattccagcgcttcggtttcacgttgcaggagattataaacctcctcgccggtggccatggactgaaattggtgcagcatatcccgccgccagctgaaaaaatcattgtccctcatagctgtgcaaataactcctg

SEQ ID NO: 379 - DNA, 217 bp, Klebsiella pneumoniae
  marker
tttcggcgaagtattcagcaaaccttcgaacaggtcgcggctaatattggcctctggcaccccttcgattttatttgggtccagcgattgcggctcggcgccgctattacgtaccagggtttgcttctctgccagctgcactccagccgggacatccgctgccattgccatattgccggcgatcagtgcggatagcactcccgcggcgattaaacgc

SEQ ID NO: 380 - DNA, 214 bp, Klebsiella pneumoniae
  marker
agccccggagcttgccagtaacaacatggtcagaacaatttttttcatgattttgccagttaattcaataaggttcccaggtggcaaacagactgacggccagcagcgccagcgcgcccagccctatttcagcctgcgtggttcgcaggatcaggctttccgcccgcgaaccgcttgccgacatgcgcggtaccagaacatacctgttcactaa

SEQ ID NO: 381 - DNA, 213 bp, Klebsiella pneumoniae
  marker
gccttttatctcaacgggcggccggccagcgagccagtggaccccgaaatcgtactggatttgctctcgcgctatggctatcaggtgacgccggagatgacccccgcgcagaagaagcgggtgattatcgccttccagatgcacttccgtccgcagcgctgggatggggtagcggatgcgcaaaccgaagcgatagccgaggcgctgttagaa

SEQ ID NO: 382 - DNA, 213 bp, Klebsiella pneumoniae
  marker
gcgaacgctggtgccggtggtgcgggagatgccgtacagggtatcgccgcgtttaacggtgtaggtgccaccggaatcggaggtgctggagcagccggccagcaccaggcttgccgccagcatcagtgtcatataaaagcgtttcatcatcaggcatcctgcacttaacacaaccacttacctcgcaatcagggcgaatatcataccagtccg

SEQ ID NO: 383 - DNA, 212 bp, Klebsiella pneumoniae
  marker
gagtaaaaatcctgctcgtggctgggtcacgggtattctcgccgataaaaaaccaggcctgattatagcctggtttcatgaagggtgctggggttttatacaggtgttcggcgctaatgttgccccggattgcggcttgcgccttatccaggctaccagatggcgcagagccctggccctgctaagcgcagcgcgagcagggtgattattgg

SEQ ID NO: 384 - DNA, 210 bp, Klebsiella pneumoniae
  marker
cgccgacaaactgatcgcccgcctgaagccgctggtggaagcgctgaaagtaggcccgggctgcatgcgcggccaggaagagaacgagatgggaccggtggtgtctgatacccaccagaaaaaagtgctcggctatattgataaaggcgaaagcgaaggggcaaaactggtggtcgatggccgcaaactgcgcgtgccgggttacgacgc

SEQ ID NO: 385 - DNA, 210 bp, Klebsiella pneumoniae
  marker
ttaactcacagcaaaccgcaccagccctgcgctgtgagatttacgatctcatgctgcgctttatttttacccagcattaaattctgcaaataaggcaaaaaaaacggctttgagatggggaaatcgcgaagaaaagcgattggcgtacagcacagtttgctgcaccgtgttctatgcttgtttagaggttttccgttcagagaaaaccaa

SEQ ID NO: 386 - DNA, 208 bp, Klebsiella pneumoniae
  marker
gtgcaggtttccgccggtaaaatcggcgcgctaccgtcgtccaatgcccagcaattaaccgccaccgtgcgcgcgcagtcccggctgcaaacccctgaccagttcaaagcgatcatcgtgaaaagccaggccgacggctcggtggtgcgcctgagcgatgtcgcgcgggtggaaatgggtagcgaggattacaccgccaccgccaatc

SEQ ID NO: 387 - DNA, 208 bp, Klebsiella pneumoniae
  marker
cctggcgagcatagtcttccagctttgcgcagcccagcagcggtcggcgcaggctgccatcggccagcggcacctcggcgctgagcagcgtcgcgccccagtccgccacggtgacggtcatccccgacttattgcgcagggtcacctgctgccatggccggccgtccggggccagcgcggtggtttgcgttagcattgcccggccccc

SEQ ID NO: 388 - DNA, 208 bp, Klebsiella pneumoniae
  marker
cgatgccgccggggaaaaaaataaaatgaaccccaccatggctgacgaagagcaggcctataacgccgggctgatggaggggatccgccttatcggcgaggtggtcgagcgccagcccgaggccgaggcgctgattcactacaccttcgaggcgcgcaagcaagccaatgcgccggtggccgatattccccagaaccagcgggtgcgg

SEQ ID NO: 389 - DNA, 207 bp, Klebsiella pneumoniae
  marker
ccctgatggagattgtccgcgaggttgaccaccggtacgcagtacgggccaatcgccgccggcgtcaggtcgataacgcggatccccggcttcgcttcgcgcagcgcggcatcgtttttgatgtgcgccccggcgctggtggcgtcaaaaacaaaatcgatgtcggcaaattccgccatctgcatcaggccgcccaccccttcgtga

SEQ ID NO: 390 - DNA, 207 bp, Klebsiella pneumoniae
  marker
agcaggatctgcaaaaacaggcggataaatacggtatccgcgtcgaacccatcaatatgatggactacggcatgcaaaaaggcgccgcggtccttgatttcgccctttcccttatcgaaaacaagaactaaggaaagatcatgagctctctgtacgctaaactgatcgacgtgatcgaacggcagatcacgcctatggccggcgcga

SEQ ID NO: 391 - DNA, 207 bp, Klebsiella pneumoniae
  marker
tccaaagatttaaacgatgtgatgcgtcgtcttcccggggttgatatttcccgcaacggcggcatggggcagagtgcttcgctgtatgtccgggggacggaggctcgccacgtgctggtgctgatcgacggtgtgccgatggcgcgtcctgggatctccaacggcgtagatatcagtcagatccctatctcactggtccagcgggtg

SEQ ID NO: 392 - DNA, 204 bp, Klebsiella pneumoniae
  marker
cggcgcgcaagaaaggattactgatgggattcgccagccagcccgaagagcagatggcgtcggcgttcagcgtcttactcggctgcctgcagacgcactgcccgcagatgctcctgctccgggaggacgcagaaaaacaaaacgccccaacctgaggcggggcgttatcggggagcctgatatcaggtatcaggcaggcgtggc

SEQ ID NO: 393 - DNA, 204 bp, Klebsiella pneumoniae
  marker
gtcgctaaccatgtcagggaggtggtatgaagatcctgcttactggtggtaccggcctgattggccgacatctgatacccagattgctggagctcgggcatagcgtcacggtctccacgcgacatccggataccgcccgcgcccgtctcgatccgcgcgtcaccctgtggcgcgatttcgagggccatcaccacctcaatgaca

SEQ ID NO: 394 - DNA, 204 bp, Klebsiella pneumoniae
  marker
gctgcttttcagcgttcggcagatcgttctgttcaacaaaatgctgtgccagctcgagagaggcgaaggcgccgtaggtatttttattgtcagccgcgaatttctctgcccctgacagcacttctggcgtattcgatttcagcgcggaagtcgccttctcgtaagccagcgacgcgtctctggcggtatcctgctgatgggagg

SEQ ID NO: 395 - DNA, 203 bp, Klebsiella pneumoniae
  marker
cgatgccgccaacaaagttgagcagcgtaccgtggaaaccggcgacacctacggcgataaatggctggtgctgagcggcctgaaagcgggcgacaagctgattgtcgaaggcaccggtaaagtggcccccggacagacagtgaaggccgtcgccgtcaacaataacggaggcaacgcctgatgttctcccgtttcttcgtgcg

SEQ ID NO: 396 - DNA, 203 bp, Klebsiella pneumoniae
  marker
gtcgatgatctgtctcaggcgcgcagcggtttccgccagcgcctgaggccaggctacctgctggccgtcgacctccggcgtcagcagccgccccgccaggcccgtggtctcccctaaggcggcccctttgacgcacagacggccgaggttcgccgggtgctgatcgtcgccgcgcacgctcacctgccccgcgtcgtccacgc

SEQ ID NO: 397 - DNA, 202 bp, Klebsiella pneumoniae
  marker
agtgctgacgcgcgacagaacgacgcgacgaatcaaacgaaaaacattggttcattatctggtatcacctccacaccgccctgcgacagggtcggcgacaagccaaagctatacataccgggcaacaggcgctacgccgctgcgagattctgtaaatacagactgcttaacccggctggaagtggcaccacagggccatgcc

SEQ ID NO: 398 - DNA, 201 bp, Klebsiella pneumoniae
  marker
gatcagcggataaaaggcatcggttgtcgcccgggtcggttgaggcgtcaccggcaccatccgcagcctgccatcgccatgccagccgcgcgtgatatcccaggcgacctcgctgcggctgaccggccagcgcaccggcggcatggcgtcccacgcctcacggctgagatccgccagcgcgccgatatcaaacgcccgctg

SEQ ID NO: 399 - DNA, 198 bp, Klebsiella pneumoniae
  marker
cctgctcggctgcgttttgatcctcgcgggagtgctggtgagcgagctgaagtggaagcgcaagtcgccgccgcaggtttccacaaacgacgatgcgcagccgctcgctgacctggccgatcgccgcgagccataatattttccttctgacccgacagcggcgcttatcctggctggaatactcgtccggctctgatt

SEQ ID NO: 400 - DNA, 198 bp, Klebsiella pneumoniae
  marker
tcggtttctccgtagcatgagatgcaccctctaagcatttttcatgccagattttatttaattgatttaactatgtttttatatcgccctctgccgatacgacatgtcgatgacagccccggggcgtcgacatcgacattgactgccacgacgatttcattctggcatcgttattgcatagaaggcgcatcgcgatac

SEQ ID NO: 401 - DNA, 198 bp, Klebsiella pneumoniae
  marker
tcacaggatggggaggcgtgaggagaatgttaagagaaatatttcatatcttaatgaaaaacatgaaattaatagcgatatcgcaaaatattatccctaccgccagctccgcgctggctaataggttttgctaataatcgcgcaggcgtgaagcgagactcccacgcctgcatggcgacgaactaactcagcagtcct

SEQ ID NO: 402 - DNA, 197 bp, Klebsiella pneumoniae
  marker
cgacggtaatggcaaaccgcgcggggtcgcgctcaaccagccgctgcaccagccgggtggccgccatgccgttaccgatcaccaccagtcgccgcgtcatgaccgcctccttacgccgctttcggctgtttttcatacaggaaatggaggatctgctggcgcagatggtgataccggctgtcgtccgccagctgaac

SEQ ID NO: 403 - DNA, 196 bp, Klebsiella pneumoniae
  marker
tgaccgacgctgagcgttcgcagatcaacgccggcgcgggtacgaacggctatcagtcctatgacggcgcctttaacaagcggtttggcgatacgttggttaccgctgctggcgcctatcagaccaccaaagggtttaacgtccagccgaattcctcttacagcggcgacagcgatcgcgacggctaccgcaataa

SEQ ID NO: 404 - DNA, 196 bp, Klebsiella pneumoniae
  marker
cccggcccagaagcgcatcggatgggcatcctgccagcggcggccaaggccgttgtcatactctcccagcatccggccggtgaggtattgctccttggtattgagccagccgcgtctggcgagcaggcgggccgtctcccgggtgttctccggcgaggcggcgatccagcgctgcgcctccatcagggccgccacc

SEQ ID NO: 405 - DNA, 195 bp, Klebsiella pneumoniae
  marker
ctaaaccacgtttagctttaaagttagcacaaaatatggcctggtgggtgaggggggcgcaaatgtcggcattcctggggcgaataccgacattttaccggggttatcgtttcagcggcgtcgcttcaactccggaatcagcgtttctccagactctgtcgcagcgtcccggctggcgcatggctgttgttgccg

SEQ ID NO: 406 - DNA, 195 bp, Klebsiella pneumoniae
  marker
gctgtgtttttagtggggatacgatttccctgtattaactattatctttatctttcagccgtcaaggcagggcgtccacttttttagcgcagagggagaaacagctatgcagcgttgcggatgggtgagtcaggatccgttatacatcgagtatcacgataccgaatggggtgtggcgcaaaaagagggtcgcca

SEQ ID NO: 407 - DNA, 195 bp, Klebsiella pneumoniae
  marker
gatgaattgtaacggcgattagtatattttgtcaacatgctttttagcgcccccgattgccgtttgtgctggtatttcaggcttttttagcaaaaagatgatgaagcacttcctgtcgccagtaaaagatggttaaatgaatactcacaattaatgcataaaaatgcagttaaggttgttgggtcgaactcacca

SEQ ID NO: 408 - DNA, 194 bp, Klebsiella pneumoniae
  marker
ggttaggattttcctgtagtgtaaggcgcttaacgccctgacaccaacatcgttacgctacatcttatgcaaatttattatatatgatccgctttagggtatagcgaaaatcagggctttcctcaccctttttgctggatatctcccatactgcaaaggtcagcctgttgacgtctggagcatggaagatgaaa

SEQ ID NO: 409 - DNA, 193 bp, Klebsiella pneumoniae
  marker
cgcctcttcagcgtatccgctgctgcagccatgggccagaccattctcgacgacctgcaagattcgcttcaccgccgggtaatttccctgcgttttgcgctgcgtttgtttaccgacaaactggaataacagatggcgccccaggggccctgccagtacgcgttcacgaacaggcacctcccggctggtcggt

SEQ ID NO: 410 - DNA, 193 bp, Klebsiella pneumoniae
  marker
ccgctatagcgcagatagcatggcaagtgaattaaaaagggatcgccgtttcattttccgcttttactttgcgcttttccttatcttcacaaaccgccagcgcggcgcgaagaaagttgcttctcattttgctcaactggtactcttgccaatcgttatgcacaaaaccatgcactcattgacggggaaggat

SEQ ID NO: 411 - DNA, 193 bp, Klebsiella pneumoniae
  marker
cgccggtgctggcgccgccttaacgtctgcggcctgagccgtgatagagaaaccggtggtcaacagcgtggcaaaggcaatacgggttatcaatttcattattttttcctgaagtaaaggtggcagaaatagcggattattattttacagggcgcagtgaataaatgtaaaaaatgatagccaaacattataa

SEQ ID NO: 412 - DNA, 193 bp, Klebsiella pneumoniae
  marker
cgaagcctttaagctcgccgggcatcaggtcatcacgatcgaaaagcaggctggcaaaacggtgaagggtaagcagggagaagccgaggtcgccatcgacagagccatcgatgacgtcacaccgggtgaatttgatgccttattgctgcccgggggctactctcccgaccagctgcgtggtgatgaacgcttc

SEQ ID NO: 413 - DNA, 190 bp, Klebsiella pneumoniae
  marker
ggcctctgtatcttaatataaagtcaatgaccgggcgtcatcctgctgataacagcgaggacgtgtgttggattatttaacgactttcagttacgcaataatttgtaatggctgccagtggcggttgccctgccccgaggaatagtgtttcgccatctccaccagcgacgccgcggcggtttttaaccgg

SEQ ID NO: 414 - DNA, 185 bp, Klebsiella pneumoniae
  marker
tttttttacctgggctatagcctcttattctggctacagttattctggcgatgcttccagttgcgagcaaccactccgggagagatccgctctccttttctcaggcaatgaaaaaatatgcatgatttttgcatgcgtagaaatgcgtatatttgagcccgtaagttaacgggtgttgagaagga

SEQ ID NO: 415 - DNA, 184 bp, Klebsiella pneumoniae
  marker
atcatctcctctatattttcagccagtgtagaacaaaaccacgcaactcgcagcgtcgcggcacgtgactggcgcttttttagaccgactatacttagagaggcttgagcgacgctcagcgaagggggtaatgatgaagcaccaattaacaggccagaccggggacgaccttgacgtcaacgta

SEQ ID NO: 416 - DNA, 184 bp, Klebsiella pneumoniae
  marker
acgagcaacaccttgcaatttctctgacggaaagtcaggtgatttgttacaattagatgcattttgtcgttctggggggtaggtatttacttacttcagtcttatacagggaagcgttcagagcgcctaagcagcgaccataatctcataaaaatcttgtcgccctatatgccacgcgctcaga

SEQ ID NO: 417 - DNA, 182 bp, Klebsiella pneumoniae
  marker
cgctttgctgttggtggtcctgagcggacgtttagataaattgccacgccgttcggcagcgctttctcccgaaggctaagggtttctcgcaatttgcattgaaagtgtatgggaaaatccctataacagaataaccagtcgtcgtcgggctggtttctgttatcgaggattaatgcccaaat

SEQ ID NO: 418 - DNA, 181 bp, Klebsiella pneumoniae
  marker
accgtcaaaggtgggaagacggcgctggctgctggaaacctcagtcacgccctgcgggagccacgtcggcgcccagttgaagttagctttgtcgcctccttcaggcaccgacagctgcggcggcaaattcgcttttgccagcgtctccatgctggcgctgacgttatcgccaacgttgaag

SEQ ID NO: 419 - DNA, 181 bp, Klebsiella pneumoniae
  marker
cgttccgaaggaaccgcctggctgtacggcgctaacttcaactaccgcttctgataagcagcgcgccacaaaaaaagggtgaacattatgttcaccctttttttatcattcgccgatcactgtgaatcgatatccttcagctcatcctgaatagcctgagcattcgggttgtccgccgggg

SEQ ID NO: 420 - DNA, 179 bp, Klebsiella pneumoniae
  marker
ttttgaccgcacgaccagaccccttaatacgaaagtattaaggggtttttttatgcctgtaaaaaagttaacggctctttaactccataataactatctggttattaattcagccttcgaccggcggcgacaggcatatcgcttgccttgccttcgacgtttcgcctattatatcgccc

SEQ ID NO: 421 - DNA, 177 bp, Klebsiella pneumoniae
  marker
gtcgaccccggccttatccagcgcgccggcgatctgctgcacctgcgccagggaatactggtgacgaatggcgtgcataccatcgcgcagcgtcacgtccgagatataaagttttttaccgttcatgctgtcgctcccgccgcgctgtgcattgccccggccatttgctccgccgtc

SEQ ID NO: 422 - DNA, 176 bp, Klebsiella pneumoniae
  marker
gcgcgctgcggtcgatcagccgcttcagcccgccgaggtcggtcccccctttctcctgcagctcgctggagagggtaatcgcctggccattgcggttgagggtcatcaaattggccatcgcctgcggcttgctggcgatccccagttcgaggccgtacagcaggccatagagaata

SEQ ID NO: 423 - DNA, 176 bp, Klebsiella pneumoniae
  marker
aggggatagtcgagaataagcgccactcccggagacatgaccggtcaggagccacgcattccatgttaaaacgtctttttaccccgctgacgctggtcaatcaactggcgttaatcgtgctgctcgccacgattattggcgtcgccggcatggcgatctccgcgcgcctggtgaac

SEQ ID NO: 424 - DNA, 175 bp, Klebsiella pneumoniae
  marker
gtgccgcaagggcatttttttgacgacgcagcgcgccgggacggctaaaatgccgctctcttcatttgtattaccaataattgataacggcatgaaagcagaaactccctcttttgaagcacatcagtttgtgcgggtgcgtcgcggcgatgcggtgcgccgtctgattcaacgc

SEQ ID NO: 425 - DNA, 174 bp, Klebsiella pneumoniae
  marker
acgtttacgcatcacgatctccttctccggcggcaacgaagcgtgccgcgactgagccaataccttcgatatgggcgacaaagctgtccccctcgttaatcgtcaccatcgggcctaacgccccggtcagcacgatatcccccgcccgcagcggttcgccgagactcgccagct

SEQ ID NO: 426 - DNA, 173 bp, Klebsiella pneumoniae
  marker
taaccaggcgttcagcatccagaccggcgagatccgctcccgcggccttgagctggaggcgaaggcggcggtgaacgccaatattaacgtcaccgcagcctacagctacaccgatgcggagtacactcacgatacggtgttcaacggcaaacgtccggcggaagtgccgcgta

SEQ ID NO: 427 - DNA, 172 bp, Klebsiella pneumoniae
  marker
ttcattgccgctcgccagcgcctcgcgcagcaccaatagtcggtcgcgcagcctgccaacatcgcgtagctgggcgttgagcatatctatctgctgcgtcagcagctcgggcagcgacagcgtttgccgatcgagatagtccttgattgtggcgagcgttagcccggcctgc

SEQ ID NO: 428 - DNA, 171 bp, Klebsiella pneumoniae
  marker
agcaccatcgaccagcaggcggccctgcagcaaaaggcgttattcgaccaggttttacctgccgaccgctataataacgatctgcttaagagctgctatctggtcagcgccccggcgctgggcaaaggccagcataaagtgtggatcgccaaaaataacgatcgaccgatc

SEQ ID NO: 429 - DNA, 171 bp, Klebsiella pneumoniae
  marker
tatcagccgcgtattcccactaatcaccatgccttgctcctttgcttactgcgataactcgatacgtttgacgtcgccgaggataaacagataggccaccacgcccagcagcgcggcgccgccgatgtagatcaaggcgtagaagaaattgccgaacccggcaacgataaa

SEQ ID NO: 430 - DNA, 171 bp, Klebsiella pneumoniae
  marker
ttaccggtgcttatggcatcggcttatacggaatggataccgactttcaacataacaactgatggtaaggttcaggccagaggggaaactaccctcctgaatcctccgtttcgctttcccggccgcttattgcgctcggtaaaggccgcacctgatgcggaaagataacag

SEQ ID NO: 431 - DNA, 171 bp, Klebsiella pneumoniae
  marker
acgggttgccgtagtggttagtgtcgccatttaccgaattctccagtcgaaaatacttcgctcacgttgagcatgacgcactgtaccagtacacgagtacaaagggaataaaaaaagccccaatcatgacgatcggggctgtattatttagtttacgctagcgggcggcgt

SEQ ID NO: 432 - DNA, 171 bp, Klebsiella pneumoniae
  marker
acgacggtaaaagaggcgctctcctatacgcccagcgtcttctccactcgcggcagttcgaccacctatgacgtggtcaccattcgcggcttcaccacctcgacgaccgtcaacaccaaccagtatctggacggcatgaagctgcaggggaataactactctgaagtctcc

SEQ ID NO: 433 - DNA, 170 bp, Klebsiella pneumoniae
  marker
cctgatgccagtcaccgactggctgctggcgcacggctggctggtgacgcccaccttgccctgagtcagtttttgcccgggttcgcccgggcgcatcaataacccgttacggaatattttccgccgcgcctctggcgtcggttcggttttcgtttacactgccatgattt

SEQ ID NO: 434 - DNA, 170 bp, Klebsiella pneumoniae
  marker
tgacgatgactcgacgccgcttagcagccgcaaaccggtcacgcagagttagatcgaatggcaaggtaatcgccgatcaagccgccttctcaggcggctttttcatgcctgccagtggtggaaagcgcgtaaaagtggtataacaaatcgaatattgtcgccatcttccg

SEQ ID NO: 435 - DNA, 169 bp, Klebsiella pneumoniae
  marker
gtgggacactaaagataccgcgccgctgctggcgctgtggctggacagcacgattcatgcccatccttttatcagcgaaagctactggcgcgacagcgtcgcggtagtacgggatgtctatcttcccgccgccagcacctgggtctgggagcaggatggcgagttaaaa

SEQ ID NO: 436 - DNA, 168 bp, Klebsiella pneumoniae
  marker
catttgtatggctaccgccatggtgatgtacctgccatttctcaaagcttacgaaaaacagctgctggcccaggagcgtgaaaacgccgtcggccaggctgacaacgcggcgcaaaccgcttaacgctaacgattcagaggataatcatggaattagaagaacaggtg

SEQ ID NO: 437 - DNA, 167 bp, Klebsiella pneumoniae
  marker
ccggagaacgtggcacccattgtcaccgtgcggccggaattaatggtagatgaactgacgccgcagactctgaaagccgcgctggagtgggctgatgtggtggcgattggccctggcctggggcagcgcgaatggggacgcagcgccctgcggacggtggaaagttt

SEQ ID NO: 438 - DNA, 165 bp, Klebsiella pneumoniae
  marker
catcattattaagctatctaaagtaatacagcgcctgaggatctttccagttttaattatatctgcgctcaataaaaaaagccgccgcctctgacgagacggcggcctgaacctgattacttcttagcgtcagctttcgcgtccgcggctttcgcatcgcctgcg

SEQ ID NO: 439 - DNA, 165 bp, Klebsiella pneumoniae
  marker
tcgcggctgccgagcgaagtccagcagtccggcgtaacggtggaaaaatcgcagagcagctttctgctgatccttgcggtgtatgacaaaaccaaccgcgccaccagctccgatatctccgactggctggtcagcaatatgcaggacccgctggcgcgcgtggag

SEQ ID NO: 440 - DNA, 165 bp, Klebsiella pneumoniae
  marker
gtggcgggcaaagcggtgggctacgcggtgttcttcaccagctactccacctggcttggacgcaatggtatctatatggaggatctgtacgtcacccccgactatcgcgggatcggcgccggaaaagcgctgctgaaaaccatcgcgcaatatgctgtacaacgt

SEQ ID NO: 441 - DNA, 165 bp, Klebsiella pneumoniae
  marker
aagcgacgcgcgcgcggtgccgtcggaccttggcaaatggttcgttcgcggcagcgataacagcatgacgccgttctccgccttcgccaccacccactggcaatacggcccggaaagcctggtgcgctacaacggctccgccgcctttgagatccagggcgaaaa

SEQ ID NO: 442 - DNA, 164 bp, Klebsiella pneumoniae
  marker
ggggtatgactttgttgagcatcaacgtcaaccgctggcgaagccggccttccaggcgatccgtgatgcgcttatgcatgctgccgagccgatcaccctggtggcgattggcccgctgaccaatatagcgctgctgctgacccagtacccggaatgcgtgttta

SEQ ID NO: 443 - DNA, 164 bp, Klebsiella pneumoniae
  marker
tcctgacggcccgtcgaacacgggccaaatcagatctgcactcgccgggaaatagcagcgcgcccggcgagcagaagcaccaggatggtgcaaatgcactgttaagcacgaagtatggcaccggaccatatggtgatcagtttttttgccggagagcacccgat

SEQ ID NO: 444 - DNA, 163 bp, Klebsiella pneumoniae
  marker
ttcgctggtgggtgacctggtgctggtccgtctgcaggaagagcgggatcctcttctgcacaaacgcttatataacgcgctgcgccgcgcgatcctcgacggttcgctggcaccgcaaagccgtctgccgccgtcgcgggacctggcgggcgaacttggcgta

SEQ ID NO: 445 - DNA, 163 bp, Klebsiella pneumoniae
  marker
ttcctcaccggtctgacctatggcgcgatcctgatcgtcgctatttcctgcctgtggttgtgcagctgggagcgtgagcgcggggaagaggtggaaaccagcgcgaaaaaaggactactgagcaccctgctgtcgctggcgaaagatatgcgttcgacttttt

SEQ ID NO: 446 - DNA, 163 bp, Klebsiella pneumoniae
  marker
ccggcatatcacggtggaatgcacgctgctggcgcattttttcgcttgctgtgcgggtttttcgccaaattcccaccgccgtcgcagtcgcgacagggccgagagcgataaaatgatgaatatggacaattggtgccactgataccttcggggagaaccacgc

SEQ ID NO: 447 - DNA, 162 bp, Klebsiella pneumoniae
  marker
caagaaatgtggatatgaattgaagccgtgaatactacgccggaagcctgcgtttgcaaaccgctattcagcctgccgcgcggcgcgctcccgtagttccgatgatgtcagaattcgcaccccttcgtgggtgggcgacagcgcctccgccagcagggcgat

SEQ ID NO: 448 - DNA, 161 bp, Klebsiella pneumoniae
  marker
cggcgacacccgccgcgacgatctgacgtggaacatcgtggccgccaaagaggggctggtggcgaaaggcgtggatgccgaaaaccagctgcgcgcctttgtggtcagcgaagacaaaatgaaggaagcctttgcgctgctcaaacaactggtaagttgat

SEQ ID NO: 449 - DNA, 161 bp, Klebsiella pneumoniae
  marker
ccggcgtttccgtccgcttcagcgctgctgggtgccttgcgatgacgggtatcaccgggtgttctatcgcctggagggcgagctcgccgaagatgacagcgtgatgaccctgcggagctttatcgatggtgaaggcgaagcgttggtgctggaggagattg

SEQ ID NO: 450 - DNA, 158 bp, Klebsiella pneumoniae
  marker
aggacgcagacgtccttaggcggcccgcgatgcgggcgatactgaagcctaagcatttttactgacacgtcatcttacacaaagccagtcctgaggactggctttcgcggtttaagcggcgggcaaattgcgttaccttgtcaggagaagatcaatcg

SEQ ID NO: 451 - DNA, 158 bp, Klebsiella pneumoniae
  marker
tcctgggtagcagtcaaaactgatatcggacaaggcctttacgccagggaacgtcatggtgatgccgcgaaatgagagataaggggtagactgttgcataacgactccgctcttctgcactcagcccccgcgccgcggcgggggccagtttaatcagg

SEQ ID NO: 452 - DNA, 158 bp, Klebsiella pneumoniae
  marker
ctatgctataaaactggatatggctgcctatggtcatatcggcagctggatgacgcaggtggcagcgcgtccggcggtggcggccgcactggcggctgaaggcttaaaataaggcctgaacctgcccggcggaccgtcgggcaggccctgggagttac

SEQ ID NO: 453 - DNA, 156 bp, Klebsiella pneumoniae
  marker
cgaaacttgaccagatgaacctgcgctgacaaccgtcgtgcgagtggcgggcccacggcaggtgatgaacccgtagccccggtaagcatcgcgccaccggggaatttgagtcaaagctccggtaaatcgatccccggagattatgcctgcgccagt

SEQ ID NO: 454 - DNA, 154 bp, Klebsiella pneumoniae
  marker
tccgctttcaccgaggcaaggtcaaccagaatgcaatccgccggaaggggcggcagcctgccgatcgtctccacggtggtgtgaatcggtacgctgacgataaccatgccggcatcggcgacgatatccgccgcccgggcccaatcgttttttt

SEQ ID NO: 455 - DNA, 153 bp, Klebsiella pneumoniae
  marker
ctgcgcaggcgcggtgtagactcctgtgatctgtttcatggctttctcctgtgtatcggtatctgatgtgaataagcttatatccgggacgacgtatgcggtagtgagcaaaaatgacctatactgttccaaaaatggaacaatggaggaagg

SEQ ID NO: 456 - DNA, 153 bp, Klebsiella pneumoniae
  marker
ctccaccagggacatctggtcgcccagggcacgccgcaggaggtgatccagcagccggttatccatcgctggtacggggcggatgtccgcctcgtccagcacccggacaacgcggtcccccaggtttgtctggcgccataatccccgcgcggc

SEQ ID NO: 457 - DNA, 152 bp, Klebsiella pneumoniae
  marker
gcggacagctgaagacggcttgatcaaacggaccgaccatcgcgccttgctgaaactcgcctaagtcgccgccgttgcggccagacggacatttagaatagcgtttcgccagatgatcgaagctgacgccccgctccagtttggcgaggatc

SEQ ID NO: 458 - DNA, 152 bp, Klebsiella pneumoniae
  marker
tgacgtcggtgggtttgagactttcctggcgcatcagcgccagtacggcatcggcaaacagccgtcccagacgggtgtccagacgacctagctgcgaaagggtcagcgactgcccctggcaaatcgccagaatctcttcttttatcgcgtgt

SEQ ID NO: 459 - DNA, 151 bp, Klebsiella pneumoniae
  marker
gatctcaccagcaatagcgattgcaacggctactggaaacgattgccaggactggtgcttcaggcctgataaaccgctcactttgttaacaacagtgctcagattttaatgcattattaaagatgcagcttttctggctggcgcgtccagg

SEQ ID NO: 460 - DNA, 151 bp, Klebsiella pneumoniae
  marker
gagcgcgttggtggagcgcaatttagcccatctgacgctgtaaattttatgccagaccttgcacagcggtgattttttgccaggataaagaggttgcatcaagtggtgtgacctcttacctcataaacaacaataacagaaaggcattagt

SEQ ID NO: 461 - DNA, 150 bp, Klebsiella pneumoniae
  marker
cgctggacgacccgcagcgcgccagcattgatggccgcgggtcacatacctggcgtgagctggcggaggcattcgaactcgatattcacgatttcagcgccagtgaagccaaccgttagcggcaggcgaaaaaaatcccgactcgcagga

SEQ ID NO: 462 - DNA, 149 bp, Klebsiella pneumoniae
  marker
tggccatccgccgatgacgggcgatctgattatctggcattacggtgaggtccaccagcggaaaatcattgctatagagcgccttcgccagcgccggatcggcgaatagctgttgccagttgcgggcccagggccaggggctcactttg

SEQ ID NO: 463 - DNA, 148 bp, Klebsiella pneumoniae
  marker
ttaggttaatcggcgaaggagagcgccatgtcgttactggctaaatcgcgaaaagagggacagatccagcatattacgccgcaaagcgccggttggcgctatatcggctttgatgtctggatgttgaaaaaagggcagaccgtgacgc

SEQ ID NO: 464 - DNA, 147 bp, Klebsiella pneumoniae
  marker
ctgacttatcgtcacgtaactggcgtatcaatccccgtacctgactgccaaattcggctttcagggtattcattttttcacccggggcatcaatggtgatcaccgcgattttgtccgcacggacctcaagcttaaaagcggaaacag

SEQ ID NO: 465 - DNA, 147 bp, Klebsiella pneumoniae
  marker
tacagaccaaccagtggctggttgaccgcggcgaaacgccgatcgactggatgccggtccttcccgctgaaagcgagtgattgacagccataaaaaaagccagcatcagctggcttttttgcattcaggcaggcgaatcacgccttg

SEQ ID NO: 466 - DNA, 146 bp, Klebsiella pneumoniae
  marker
ggttccatctccactggttacgatgcctctatgatagcggaagcgcggcgggttatcagcctcagcgtttggcggaaagcgccacgtaacgctggattgaggcccgctgccactggaaagacgcataatcagccagcgcctccggt

SEQ ID NO: 467 - DNA, 146 bp, Klebsiella pneumoniae
  marker
tagcctgcagtaatttgctgttggcgggatcctggcgggcgtcattgagtaactgcgccaggccgtcgctcagataggggcgcagcgccgccggatcctgagtacgattctggatctgggtgtcgtagaatttttgcgctacgtcg

SEQ ID NO: 468 - DNA, 145 bp, Klebsiella pneumoniae
  marker
attaccgcgatctcctcacggggtgaatctttactggcgcgtttagccttttagcctgaaggatgacgggatgaagtatcgcataaccacctggcttgccgctgcgctgatgctgtcgagtcttcacgccactgcggcgagttta

SEQ ID NO: 469 - DNA, 145 bp, Klebsiella pneumoniae
  marker
agcgatcagggttgcgttcattagggacctgttgtgtcgaaaaataagctgaatttatacaaacacaggttttacgttttcacaatggatttattttcatccacgaaaatttgcgcgaaagatcacagttcggcgcaaaagggca

SEQ ID NO: 470 - DNA, 144 bp, Klebsiella pneumoniae
  marker
gacctcagcggacaacgcgctgccgccggtggcggccagcagcagcgtggctagcagggttcctgtcgttttacgcatcatcttctccctgattaacgtgccgtctgcagcgcaacggcgctacggcgatagaggtagcaagtg

SEQ ID NO: 471 - DNA, 144 bp, Klebsiella pneumoniae
  marker
tcggatggtcttcatcaggaggcctccgcgcgggccagcagctgctggttgcccacccacactttgccgttttccactttcaccggccaggcgcgtaccgcctgttcactgccgtcgcacggccagccgtcgcgcaggcgtatc

SEQ ID NO: 472 - DNA, 144 bp, Klebsiella pneumoniae
  marker
agtgtgctccgaatagcaggcgagtcgggtatccctcaccccgaccctctcccggcgggagagggagaaaggcggcatggcgcccggtcggtcccctctccccaacggggagaggggaagggtgaggggacggcctcttagcgt

SEQ ID NO: 473 - DNA, 144 bp, Klebsiella pneumoniae
  marker
tttagcgttgcgcgtaatttcgtccggatcgatccctatcggataaacctcggtactgaacgccttaccccatgcctgatagcgtttatccccgaggtcggataggcgagtctgcatagcaatgctgtcgagaaaagcggttct

SEQ ID NO: 474 - DNA, 143 bp, Klebsiella pneumoniae
  marker
agctgcagtttcccggctggcgctgcgcttagccgggctaccgccccctgtacgttgtgtgccgggtaaggcgtagccgccacccggcatccaatccggctatgcgtacgtttacggcaaactacaccagcgccagcgcaccg

SEQ ID NO: 475 - DNA, 143 bp, Klebsiella pneumoniae
  marker
ggttccacatttaaacacagtgcaaataatatcatttatctgctgctaaaaaaaacgctgtgccgcaactcgtgctaagatgcgcagtatacctcgcaggatgcgatcgaggtaactgtgtataagacgatgacttcaggaca

SEQ ID NO: 476 - DNA, 143 bp, Klebsiella pneumoniae
  marker
gtgagtagcgcaggcaggtcctgcggttgattgagatcgactgaccggcaggtaacgccgggcaaagcgagtttttgcaatcggtcgatatggcgtgccgccgccagcaccggatagccccgcgcgcttaactcgcgcactaa

SEQ ID NO: 477 - DNA, 141 bp, Klebsiella pneumoniae
  marker
taagctcggcgacagcatcgaccagcagcagtaatttcgcgtcgtctcgcaaaaatgagcaacacgatgtaatcctcaagggccgctttcgcggccctttccatttctgtgatttgccttttgtcgaccatccgcactgac

SEQ ID NO: 478 - DNA, 140 bp, Klebsiella pneumoniae
  marker
aagtaatctgccgctgtagtcaaagcaaaaggcagccgaatggctgcctttttgtcgtcaggaggcgagcgacgattgctgccgcgcgtttgcgatctttattcgcgctcgctctcttccgcatcatcatactcattacc

SEQ ID NO: 479 - DNA, 139 bp, Klebsiella pneumoniae
  marker
cgtgcagtcactggcccgcgcggcaacgcgtggttcagcgctgcgcacccctgtcgttgcaggcggcgggccgggaagccgttcatggaaaggacgaactatcggccagggcagacgccgccggcgacaggcagggata

SEQ ID NO: 480 - DNA, 139 bp, Klebsiella pneumoniae
  marker
aatatccctccgcgatattgggcaaacgacggcgatcgcactggtgattgcgttgattatcggtctcaaatggcgggattttttgctgcacgccttcgatccaacgcaggctaaagccagcggcctgcgcggcggactg

SEQ ID NO: 481 - DNA, 138 bp, Klebsiella pneumoniae
  marker
gcttaacgcgaagcgctaagttttttgccgggtggcgctgcgcttacccggcctacatattgcgcgaaacggatgctgggtaaggcgtagccgccgcccggcgccaaccatctgccactaactcaccgcacaaaacca

SEQ ID NO: 482 - DNA, 138 bp, Klebsiella pneumoniae
  marker
tagctacagcccgccagcataaaaggtacaactgcgataagaatttttttcattcgtttgccttcgactttcccggtcacggcgggcactccgccctccgcttaacttgtccagtttaccggtcgcatcgtatttaag

SEQ ID NO: 483 - DNA, 138 bp, Klebsiella pneumoniae
  marker
cgttctgttaccccttgcgcgtagtgccgcagactttgccggattatagcctctggcgcaactattgacgcacagttgaggggcgaaaaaaaagcccgccgtcctttaggtacggcaggcccgcgacgcgtgaacggc

SEQ ID NO: 484 - DNA, 138 bp, Klebsiella pneumoniae
  marker
cgccggagtacccgcgccacgactgacgtgcggtgcagaagcggataaagaaggccggttagcgatgctaaccggccttcctgtttgagggcggcaggtgttttttcgcgaaacgctccgcggaatcccactcccaga

SEQ ID NO: 485 - DNA, 137 bp, Klebsiella pneumoniae
  marker
tctgacgatcgcgctccactgggcgcagtcgacgctgacgaacctgtttattcagcagatcccagctgtactttaaggcgtggttgatgccacgcggctggatatctttaatccgcaccggcagacccacccttaca

SEQ ID NO: 486 - DNA, 136 bp, Klebsiella pneumoniae
  marker
gtttactctcctgaatgttgtgcgggcctgcccgcagaatgtcattggcgttgactgcactctactaccttgaaaacaaactttcaaattttatgaaaagttgttttaaaatttacgcagtgcttcacactttcgc

SEQ ID NO: 487 - DNA, 136 bp, Klebsiella pneumoniae
  marker
cgctgccgcgcgccaggctttcgctcagaactttatcgtaaaacgagttatagcccagcagccaaccgccgacccgccaacgctggccaagcccgatgttgcccaccagatcgtgctcgcgccgggtcaccgagta

SEQ ID NO: 488 - DNA, 133 bp, Klebsiella pneumoniae
  marker
actgatcgcccatcggttggcctccgtctccctttcgcggctaccgtgggagccgaaacagaaataatgcgcgctcgcctcctccccgtcggttggcaagcccggccaattccattacgcttattgttttgct

SEQ ID NO: 489 - DNA, 133 bp, Klebsiella pneumoniae
  marker
ttcggtttgcgcgtcatacgccagatgttgcaaccacgtccttacagcggcggcatccgccaaccgccagtgcgcctgagtttccccggcgccaacttttaccgacattccctgcagttgattaacgacgctg

SEQ ID NO: 490 - DNA, 132 bp, Klebsiella pneumoniae
  marker
gctgaggtgaagaacgtgattactatcccgctgagcgccctgggcgacgcggtaggcgataaccgctaccacgttcgactgttgcgcaccggtgaggtcaaagagcgtgaggttatcattggcgcccgcaat

SEQ ID NO: 491 - DNA, 132 bp, Klebsiella pneumoniae
  marker
gcggaattccccttcttttaataccgtgccatcgtccaggcgcacctggtcgcgttcattgaccagcacgtcgcgtacctgtccctgccattcaatgcgtgcctgtttcatgccagctctccttctgcgaca

SEQ ID NO: 492 - DNA, 132 bp, Klebsiella pneumoniae
  marker
tggcccttgtgttccgtgatgtcttatctttatcgcggccctggcgatgcgacaaccgctttaccgtgattgtgtgtaaggcatcacacaataattgaaaccggtttcattttttccggaaaaaataaaaaa

SEQ ID NO: 493 - DNA, 131 bp, Klebsiella pneumoniae
  marker
ataggcctcgccagaaagctgggattcaccgtcgatattcagctggaagatgggattgtcagcctgtcgctgcccctgaatcagggataatcgcgcgacgctgaccgcaattgttgaccacattagcgggt

SEQ ID NO: 494 - DNA, 131 bp, Klebsiella pneumoniae
  marker
cagaatttttaattacttcatctccatcctgatgccggaaatactgcacctataacaactcaggggaagcagacattatggcattcacatcgcgaattactcttctggcggcgctggctgtcgccgccttc

SEQ ID NO: 495 - DNA, 130 bp, Klebsiella pneumoniae
  marker
ctgatgcccaggggagtccggcaaaatgaatacgcgtctctcgccgttagctattatcctgctggccgggctgctgggcgtcgccttcgcgctgagcatcgtcaacctcaatgtcgccttgccctatgcg

SEQ ID NO: 496 - DNA, 129 bp, Klebsiella pneumoniae
  marker
gcctgactcatcgatcgcaaacggcagccactggctgccgtttttttatacgttatcccggcaagctgaagcggtttagcgccgggttaactcatcaaatatggcctgctttatcgggttcgacaagta

SEQ ID NO: 497 - DNA, 129 bp, Klebsiella pneumoniae
  marker
gcgaacctgaacagcactcaggcccgtgaacagtcgctgctggcggtggaagtgaagctggcgcagaacgattatcaggccgcccgtaatctgctggctaagatcgatccgacaaaccttgagcagcct

SEQ ID NO: 498 - DNA, 128 bp, Klebsiella pneumoniae
  marker
ccccggcgccaacgcgctggacaccgcgacgctggtgaaaagcaaaatcgccgaattccagcgtcagatgccgcagggttacgatattgcctatccgaaggacagcaccgagttcatcaaaatctcgg

SEQ ID NO: 499 - DNA, 127 bp, Klebsiella pneumoniae
  marker
cccggcctcattgagcgtattcagcagggctaatgcccccggcagcgcgacgataccctcaatatcagtggcttctatctgctcgaggtagcgaaattcggcctggatatcctcctcgctgcgcccc

SEQ ID NO: 500 - DNA, 126 bp, Klebsiella pneumoniae
  marker
cctgacccgcaataattcgagctgcaggaaggcggcgacacagcaaaaccccggccgcgtacagcgcgtacgccaccggggtgagcaagtagagccaacgcacgtgcaacttgaaatatgacggat

SEQ ID NO: 501 - DNA, 126 bp, Klebsiella pneumoniae
  marker
gacccccgctccacctccagattgacatcattcagcgctttgatgccgccgaaatgcatcatcagatgctcaacgcgtaagatgctgtcggtcatggcgcgactccttttcgcaacgcaaccccgc

SEQ ID NO: 502 - DNA, 125 bp, Klebsiella pneumoniae
  marker
tttcacaataccgcttatcctcagggtcagcaattttgaactctcttttgactatggatacaggacaccccatgagcatcacaatccgccaggccaccccggacgacgccaccgctatctacgac

SEQ ID NO: 503 - DNA, 125 bp, Klebsiella pneumoniae
  marker
actttaaatgcgctctcgcggcgcgtctttatgattgagggctaaattacgggtaaattgcaacctctgcaataacctgattatcattgagtgctaaaacctgcagccgcccctgatccagcagc

SEQ ID NO: 504 - DNA, 124 bp, Klebsiella pneumoniae
  marker
gctatggtcggtggtgctggcgggcaatctcatcggtaccgcggtggccgcatgggccttcaattatatgcctatttttgatgagccaacccgtcaggcctttgtcagcattgccgaagacgta

SEQ ID NO: 505 - DNA, 124 bp, Klebsiella pneumoniae
  marker
cgtctcgctggccagccactccggacgcagatgctccgactgaatggacgcatcgattaacgcaataatcttctgaaactgcttttcccgccgggaaggggcaggatcgcgctgatgcagcacc

SEQ ID NO: 506 - DNA, 124 bp, Klebsiella pneumoniae
  marker
gcaggcgcccgccgggcgtcccgggatgacttgatggaggaagctatgccacccctgttaattgccgccacgacgccggatgccccggggttcgcggcgctacgaattgaaagccttgaacagc

SEQ ID NO: 507 - DNA, 124 bp, Klebsiella pneumoniae
  marker
gcaggccacgtgaatcatcctgtcacgtaagcgcggatcgatggcggaaagatcgatccggctcagactgccgaggttgcccccgccatggccgatctcttgtccctcggcgtcacagaggcgg

SEQ ID NO: 508 - DNA, 124 bp, Klebsiella pneumoniae
  marker
tcccggctcggacgtccgcaggcgccgtccgagctgagcgcctggccgggcctcagcctgggtgcgaacaagcatcagcataaatggcagctcaccgggcccgggggagcgagagcggaagtgt

SEQ ID NO: 509 - DNA, 123 bp, Klebsiella pneumoniae
  marker
cgaaaagtatcgcctgtttggctacggcgaaccgctaccgccgacggtgcgcaaggtgctgcaggagtttgacgatcgcagccgcgcccagcgcagccgtcaggagcgactgcggctgattgc

SEQ ID NO: 510 - DNA, 123 bp, Klebsiella pneumoniae
  marker
atcccagtggatttcatgcccctcggcgtcccgtaccagccgtgcgtcgcggtcgatggtcgccaccgcctcgccgaggcggagttcaataccatgttcaataaagaagtccccggccgccag

SEQ ID NO: 511 - DNA, 123 bp, Klebsiella pneumoniae
  marker
gatccagcgtcgatctcctgcgtttacgcaagcaaagcctggccagcaacagcgacaccctcagcgtgacgttaaccctggaagatggcagtacctatcccgaaaaagggcgtctggcgctca

SEQ ID NO: 512 - DNA, 122 bp, Klebsiella pneumoniae
  marker
ggacgttaatttcccctccccgagggccagctctcgctggcccttacgctatatccttgttgatgctgatttttcgtccaccctgctgaaataatcctgcgtgatggggctggtaacgacat

SEQ ID NO: 513 - DNA, 122 bp, Klebsiella pneumoniae
  marker
agattaacctcgataatctgggcgtgttgacgcttaaggccagcatcaacggcaccagccgggtggaagggaaaagcagtaccgtgcatttaaactacgctcatgaagagaatattttcgac

SEQ ID NO: 514 - DNA, 121 bp, Klebsiella pneumoniae
  marker
aaatttaaagttcagcgcgggaaaaagccggcgccgcgagacatctgtgctacgtcagcctcacagtataggactgtcagccgcgcgatcacagagacgaatcaaaattgaatgctaagcg

SEQ ID NO: 515 - DNA, 120 bp, Klebsiella pneumoniae
  marker
ggcggagctagcctatcggctaattcgggtcgatatcggcaaaggggaacaatttcatccgcagtttctggcgatttcgccgaataataaagttccggctatcgtcgaccacatgcctgc

SEQ ID NO: 516 - DNA, 119 bp, Klebsiella pneumoniae
  marker
tttgcagccctgtgcttcccgcccgatggcgggaagctggcatctgcgcaacgaacggaatatcaagcatgcgcattcctcgcatccatcatccagaacgcctcattgtcggcagccag

SEQ ID NO: 517 - DNA, 118 bp, Klebsiella pneumoniae
  marker
aaagaaagtgaaatgatgacccgcttaaatgtcacagccagtaaactattaagacaattgatggcttgacgacggcgcgatggcttcggagaatccgggcttcgttttttaaccgggt

SEQ ID NO: 518 - DNA, 118 bp, Klebsiella pneumoniae
  marker
gggtaatttctcctgacgatgctgactgcgccatggcattttactttccagccacagcagggcggcgatattacacagtaaaatgataaccacgctcaccgcggcgtaatgcaatatt

SEQ ID NO: 519 - DNA, 117 bp, Klebsiella pneumoniae
  marker
accttccgctggcgccagcgggcgacgcgtcggcgcggcgatggtgcttatacggggctcattctgcagcagccggagtaagtgaccgccaactaacccggtcgcgccggttaataa

SEQ ID NO: 520 - DNA, 116 bp, Klebsiella pneumoniae
  marker
ttcctatgagatagccgcccatatcccggcattcagcgacgcgctgcagatgatcttcaccggtcataccgccgccggaggcgacatggccagtctgcggctgggtatcgacggcg

SEQ ID NO: 521 - DNA, 116 bp, Klebsiella pneumoniae
  marker
tgctaccagactccttaaccgccaataccagcgaggcgcatgctctgctgcagcaagcgatagatgacggcgccaccacgctggatactcacgaggtcagcccggtgcttcgggcc

SEQ ID NO: 522 - DNA, 113 bp, Klebsiella pneumoniae
  marker
cgccaacgtgctgcatgccaaaggcattggtacggtgatgatcaccctcggcagccgcggcgtctggctcagtgccgaaggcgaaagccgccggatcctagggtttcgcgtac

SEQ ID NO: 523 - DNA, 113 bp, Klebsiella pneumoniae
  marker
ccttggccgcagtcaggatgcccagcagcagatggcgaaatcgactcgctacgcggtggcgccctcctttagctggcgtccggacgataaaaccgacttcaccttcctgagca

SEQ ID NO: 524 - DNA, 113 bp, Klebsiella pneumoniae
  marker
ccgcttcccggcgttcgtctcatgcatccgtcaatattgctgaaatattatccagctttatctttcaataagcaatcagcggggcgctggcaagcgaaaaagcggcgtcagcg

SEQ ID NO: 525 - DNA, 110 bp, Klebsiella pneumoniae
  marker
acaaaggcgaagaagaagagcctgcggcggaaaacgtgcaataccattttcttcactaaacctgcctaaaattagcgcagccactaccgcagcggctgcgtattacccgc

SEQ ID NO: 526 - DNA, 110 bp, Klebsiella pneumoniae
  marker
ttccgaatggcgctccacatcatgctggcgcagctctagcaggcggatgggtccccagacaatcagtccggccagcaccacgatcagcacgtttttaacccgctggcccg

SEQ ID NO: 527 - DNA, 109 bp, Klebsiella pneumoniae
  marker
tgggatgtttacgcacataccaaacaaagcgtgaatcgttgctccaggcaaagccggaggtgacattttcgaggatttccgggtaccactcgccgttgctgaggtcgca

SEQ ID NO: 528 - DNA, 109 bp, Klebsiella pneumoniae
  marker
tgccatgaactatgccgaagcgcagttcgcgttgggcaaagagctgtggctatgcgcttgccgcggtgacgattactccgccagctatttttcgccgacgccgcaaacg

SEQ ID NO: 529 - DNA, 107 bp, Klebsiella pneumoniae
  marker
ggtctaaggttgctcaggcgttcgcgttgtcgcgaacctattctggcaccctgttataaccagcaaaaatataaccgctagtttaatccttcctggatgcggcggct

SEQ ID NO: 530 - DNA, 106 bp, Klebsiella pneumoniae
  marker
ggttttcctctcaggtgacaaaacactgttatcagcctaaacgacgcgatgtcaggaaatgttagatatggctaaagatgcgcaaaggtacgtgcgacggcagaaa

SEQ ID NO: 531 - DNA, 105 bp, Klebsiella pneumoniae
  marker
gctatttttactctcgccctggcgatctttacccttgcctcggtcttctgcggcctctccaccgaggtgcatatctttgtcgccatgcgtatccttcagggagtc

SEQ ID NO: 532 - DNA, 104 bp, Klebsiella pneumoniae
  marker
tctgttcgaagcgcataaagcggtttaatttaggcaataaaaaaggcaccaggggaagtcggtgcctttttgtcgaaaccagaggtatcaggactctggtcgat

SEQ ID NO: 533 - DNA, 103 bp, Klebsiella pneumoniae
  marker
cctttttttccgctcatgccaaatccttgttattgatttacgtggtgtggggcgttcaacaatgcctggcaggcgagcaacgcccccggcgcatcactgttaa

SEQ ID NO: 534 - DNA, 103 bp, Klebsiella pneumoniae
  marker
tgcagcaatgaagatgctgagcagctgtacactgatccgcgtattgcggcggtgagcttcgtcggctcctccggcgtggcggagtatatctataagaccgcca

SEQ ID NO: 535 - DNA, 103 bp, Klebsiella pneumoniae
  marker
cagatgaggttggcaagggcggctcctggtcagcgaatgcaggtgtaatgacggcgtgatgggcaaccgttcaatgttatttacaaaaagagatggtatccgg

SEQ ID NO: 536 - DNA, 102 bp, Klebsiella pneumoniae
  marker
ctgttacgcctgttgcaggcgcagctggaagaaatgggactggtcaaggtaacgctgagtgaaaaagggacggtaatgggaactttgcccgctaacgttgag

SEQ ID NO: 537 - DNA, 102 bp, Klebsiella pneumoniae
  marker
tcaggttgcgcaggtgtcattttcgacacgtgtcgacaccttacgatcagtgggtcagcgccagatggcttaaatccaccggttggtcttgttccatggcgt

SEQ ID NO: 538 - DNA, 102 bp, Klebsiella pneumoniae
  marker
ccgaacgcgctatagcattgcggggcgagtaaaataacaaagggggccattggcccccttgttctgtatatcgatcgcgaaaagcccgcttaacgcatattc

SEQ ID NO: 539 - DNA, 101 bp, Klebsiella pneumoniae
  marker
cacggtcaccgtttttatcgaagtgcgctaccgccgtagcgcccggtacggtgatgcggcagccagcgtcactccgcaaaaacaacaacgactgcttaaag

SEQ ID NO: 540 - DNA, 100 bp, Klebsiella pneumoniae
  marker
tgccggggcggtcgcctccagatgcactgcgtcacctgcctggctcaggacggccagctggccttcgcgagcagattcggaaccgttaatgatcacttcc

SEQ ID NO: 541 - DNA, 100 bp, Klebsiella pneumoniae
  marker
tacggagtagtcggtctccatggccaacgtctggcgcgccgcctggctgaggatgagatgagtttcaatatccggcacatctcttagcacctgcagcatc

SEQ ID NO: 542 - DNA, 100 bp, Klebsiella pneumoniae
  marker
cgcatgctgatcgagcatcaccaccgcgatccgctgcaggcgcggttcgtatttcagcaacaccgccgacaacgtgctcatcagctggtgcgccgacgct

SEQ ID NO: 543 - DNA, 5363 bp, Staphylococcus aureus
  marker
cttcactcgcgaaagcggtgttaagttaacaagttcggttgaaacgccagaacgacttgctgacattcatttaacaaaacagcagttaaatcttgaaggtggcattgttgttgctaatccaattccatatgagcatgccttatcaaaagcatatattgaggcaatcataaatgaagctgttgttgaagcggaaaatcaaggtattaaaggtaaggacgccacaccgttcttgttagggaaaattgtagaaaaaacgaatggtaaaagtttagcagcaaatataaaacttgttgaaaacaatgcggcgttgggtgctaaaattgctgtcgctgttaataaattattgtaggtgatgatacatgaatattttattcgctatcacagggatagcatttgcactatttgttgcgtttttattcagttttgatcgtaaaaacatagacttcaaaaagacgttaataatgatatttattcaagtgttgattgtgttatttatgatgaacacaacgattggtttaacaatcttaactgcattaggttcattttttgaagggttaataaatgttagtaaagcaggtataaactttgtttttggagatatacaaaataaaaatggctttacgttctttttaaatgtgttgctgccattagtgttcatttctgtattaataggcatttttaattatattaaggtattaccatttattatcaaatatgtaggtatcgctattaataaaataacgagaatggggcgcttagaaagttactttgctatttcaacagcaatgtttggacaaccagaagtatatttaacaataaaagatattattccaagattatctagagcgaaattatatacaattgcgacgtctggtatgagtgctgttagtatggcaatgttgggttcatatatgcagatgattgagcccaagttcgtagttacagcagtaatgttaaatatttttagtgcgcttatcatcgccagtgtaatcaatccctataaatctgatgatactgatgttgaaattgataacttaacgaaatccacagaaactaaaacattgaatggaaaaacaggaaaacctaagaaagttgcctttttccaaatgattggtgatagtgcgatggatgggtttaaaatcgctgttgtagtagccgtaatgttgttagcatttatttcattaatggaagcaattaatatcatgtttggtagtgttggtttgaactttaaacagcttattggctatgtgtttgcaccaatcgcattcttaatggggattccatggagcgaagctgttccagctggctctttaatggcgactaaattaattacaaatgagtttgtagcaatgcttgattttaaaaatgtcctgggtgatgtatctgctcgaacacaaggtatcatttcagtttacttagtaagcttcgctaattttggtacggttggtatcatcgtaggttcaattaaaggcattagtgataaacaaggagaaaaagttgcatcctttgcaatgaggctgttacttggttcaactctagcttcaatcatttcaggatcaatcattggcttagtattgtaaattaatcgaagtatctaaattaaattcatggcaaaagctaaaccccatcaccaagttggcgcaacagcgcatcataacttagtgacggggttttatcataacaatctactttttcgtagccgtttttgaaatgtatgttgatggtttatctttttcaaaaattgttaatcccgttatatcttttttatgttttgaagggacaatgaagctaagtatataagcaaagacaaaagcaactgtaaatgaaatggtagatacatagaaaggtgagttacctttgccaacaccattatagacataagcaaagatgatacccaatattaatccacaaataacaccgaatgtattcgtacgtttagtgaaaataccaactgcaaatacaccagccaatggaacgccgaataatccagttacaaacaagaataaatcccataagtcatttgaattagaagcaattaagtatagtgacattccaaaaccgaaaatacctgcaatgatgataatgaaacgtgcaaagttaacttcgtgtcgctcgctaccttttccgaagaagcgttgcttaatgtcgattgaaatacaagcagatatagaatttaaactagatgaaatggtagactgtgcagcggcgaaaatggctgcaataagtaatcctgctacaaatggtggcatctcagtcaaaatgaaatatggcactacagatgatgtattgaagccttttggtaaaacagcttcatgtgtataaaatgaatacagcattgtacccataccataaaataagggtgctgaaattaaagctaggataccatttgtccataacgatttatttgtttcttttaaactatcagaagcttgataacgctgcacgacgtcttgactcgctgtgtattgatacaagttgttgaaaatatttcctaggaaaataattggaatggcagctgccgcagtatttagtttccaattgtctgcactaattaattttttgtgctcaatcgcatctgcaaagacagtgccaaaaccgcctttaatgttcataacacctagaataatgataactaaagcgccgcctaataaaatgacgccttgaatgaaatcactccaaaccacaccttcgaaaccacctaaaaatgtatataaaatacatagtaaaccaacgagtgatgcaacgatataagggttcatgtctgatacagatgtaatcgctaatgttggtaagtagataacgattgcaacacgccctagatgataaacgacaaataataatgagccaatgacacgtatgctagggccgaatctagcttctaaatattcatatgcagatgttacctttaactttttaaagaatggaacatagaaataaatgagtaatggaataattgctacgatagcgatgttacctgcaatatatgaccaatctgttaaaaatgctttctctggtgtagacataaacgtaattgcacttaatgtagtagcataaattgaaaagccaactacccaagatggcaagcgaccacttgcggtaaagaaactattcgtactttggctcgcgcgcttggtaaaataaacgccaatgaacaacatagctagtagataaatgataacggcaacccagtttagtgtgccaaatccaacttctttcatgggcaacatcccctttacaatgtattgattctttgatgtctataaatcgtattttgcaatgagttgatctaatgtttgtcgatgtgcttcgttaaaaggtttgaaaggtcttttcggtaatcctgcatcaatgccacgatgacgtaatatttctttcaatgttggataaatccccattgataacactgtttcgataatgtcgtttgaatcatgttgtagttggtaagcttcttgaatttgaccttgtcttgctaagtcgaagatttttctagcgcggcgaccattaacgttatatgtagaaccaattgcaccatctacgccagaaatcgtagcttgaactaacatttcatcaaagccagataagattaatttgtctgggaatgcttttctaatacgttcgagtaggaagaagttcggcgctgtatatttaacaccaacaattttttcgtgattaaatagctcgctgaattgttcaatagaaatattcacacctgttaaatctggtattgcataaataatcatattgttctgtgttgcttcgataatatcgaaatagtaatctctaatttcttcaaaagtaaatggatagtagaatggtgttacggcagaaagtgcatcataaccgagttctgtggcatattttccgagttcaatggcttcatttaaatctaacgaacctacttgagcaatcaatttcactttatccccaactgcctctttggcaaccttgaaaacttgcttcttctgctctgtatttaataaaaagttttcgcctgagctaccatttacataaagaccgtctaattcttcagtttcaatggcattttgagcaatttgtttaagtccttgttcatttacttgaccattttcatcaaaaggaacgagtaacgctgcatataaaccttttaaatctttgttcattatgaagtccctccaaaaaatcatttgataatatagtttacagctataattgtaaacgctatcataaaatgtaacaatatctttttgaaaattgtagtcatatttatgtataattaatgaaaatgtttttcaaaatcaatagaaatggagtgagtaaggtgtattacatcgcaatcgatattggaggcactcaaattaaatcggcagttattgataagcaattgaatatgtttgactatcaacaaataccaacgccggacaacaaaagtgagcttattactgacaaagtatatgagattgtaacaggatatatgaagcaatatcagttgatccaacctgtcataggtatttcatcagcaggcgttgttgatgaacaaaaaggcgaaattgtatacgcagggccaaccattccgaattataaaggtactaattttaagcgattattaaaatcactgtctccttatgtcaaagtaaaaaatgatgtaaacgctgcattactaggcgaattgaaattacatcaatatcaagcagaacggatcttttgtatgacgcttggtacaggcattgggggtgcgtacaaaaataatcaaggtcatattgataatggtgaacttcataaggcaaatgaagttgggtatttattgtatcgtccaactgaaaatacaacgtttgagcaacgtgctgcaacgagtgcattgaaaaagcgcatgattgacggaggatttacgagaagcacacatgtgccagtattgtttgaagcagctgaagaaggtgatgatattgcaaaacaaatattgaatgagtgggcagaagatgtagcagaagggattgcccaaatacaagtcatgtatgatccagggcttatattaattggtggcggtatatctgaacaaggagacaatctcattaaatatatcgagccgaaagttgcacactatttaccaaaagactatgtttatgcaccaatacaaacgactaagagtaaaaatgatgcagcattatatggctgtttgcaatgatagttgaaagaaggagtcattctaaaatagaatttgaaaccgttacgagagatgagagctgttgttagttccacacatcacactctatctaggaccaatctaaactatatcaaccaacagtgtgccacgggcatattaaattgaagaagcttgaacgtatagatttcaaaaatgtaaaaaaatatttggtattgaaattaaaaaa

SEQ ID NO: 544 - DNA, 1655 bp, Staphylococcus aureus
  marker
catccgacgacaattgtgatttatggtgtagtaatggcgattgtaggtgcgcttgcaggttatcttggttcaatcgtatttaaaaaatatccaattgttactaagcaagacatgattaatcgaggtgcagtagacgcatagcatcatcatattgaatagtaaaaacaaataaaacatagtaacgtgattcagtcgatgtaacagtcgataatgagtcacgtttttttatagaaaaatataagacataaaaatgtcataatttatagtcgacaaatatcatactgtataaacatttatcattttctcaagtgccttttacacgatggaatgaacttactttttacgaaattatgcgtattttataaacaaatatcattgatataacggtaaatgtaagcgtttacaacagaaataactgcatgctacgatatttttgtaaattcactgattcaagtattttaagtcaatatgaggagggatgttatgagcgattctgagaaagaaattttaaaaagaattaaagataatccgtttatttcacaacgtgaacttgctgaggcaattggattatctagacccagcgtagcaaacattatttcaggattaatacaaaaggaatatgttatgggaaaggcatatgttttaaatgaagattatcctattgtttgtattggcgcagcgaatgtagatcgtaagttttatgtgcataaagatttagttgcagaaacatcaaatcctgtaacgtcaacacgctctattggtggcgtagcaagaaatattgctgagaacttaggtaggcttggcgaaacggtcgcttttttatctgctagtggacaagatagtgaatgggaaatgattaaacgattgtccacaccatttatgaatttggatcatgttcaacaatttgaaaatgcgagtacaggttcatatacagctttaattagtaaagaaggcgacatgacatatggcttagcagatatggaagtgtttgactacattacgcctgaatttttaattaagcgttcacacttattgaaaaaggctaagtgcattattgtcgatttgaatttaggcaaagaggcattaaacttcttatgtgcctataccacgaaacatcaaatcaaattagttatcaccacggtttcttccccaaaaatgaaaaatatgcctgattcattacatgctattgattggattatcacgaataaagatgaaacagaaacatacttaaatttaaaaatagaatctactgatgatttaaaaatagctgctaaacgctggaatgatttaggtgttaaaaatgttattgtgacaaatggcgtgaaagaactcatttatcgaagtggtgaggaagaaatcatcaagtcagttatgccatcaaatagtgtgaaagatgttacaggtgcaggcgattcattctgtgctgcagtagtgtatagctggttaaatgggatgtctactgaagatatattaattgctggtatggttaacgcaaagaaaacgatagaaacgaaatatacagttaggcaaaacctagatcaacagcaactttatcacgatatggaggattataaaaatggcaaatttacaaaagtatattgagtattctcgagaagttcagcaagcacgggagaacaatcaaccgattgtagcat

SEQ ID NO: 545 - DNA, 1189 bp, Staphylococcus aureus
  marker
ctctccagctcaaattgaagcatatactgaagaagttgagcaagcaattaaagaagcgcaacatggaaataatcaaccagcagttaaagaataattaatttgtacaatcataaactggtgtcctgttttaagggcatcagtttttttatacgagatacattagtcaattgaaactatgcatcactaaatgtatgataataataaaagcgaatataaaaacgttgttattaaaggtgtgagatgatgactgaaaaacaatttaaattaactgtacaagataatacgaatattgaagttaaagtgaattttacagatgtagattcaaaaggaattattcatatatttcatggtatggctgaacatatggaacgttacgataaattagcacatgcactttcaaagcatggcttcgatgtgatacgtcataatcatcgaggacatggtattaatattgatgaatcaacaagagggcattacgatgatatgaaacgagttatcggtgatgcctttgaagtagcgcaaacagtgagaggcaatgttgataaaccatacattataatcggacattcaatgggatccgttatagctagattgtttgtagaaacatatccgcaatatgttgatggtctaattttaagtggtactggtatgtattcattatggaaaggtttaccaaccgttaaagtgttacaactgattacaaaaatttatggtgctgagaaacgagttgaatgggttaaccagttagtatcaaatagttttaataaaaaaatacgtccattacgtacacaaagtgattggatttctagtaatccaattgaagtagataactttattaaagatccatatagtggatttaatgtgtcaaatcaattattatatcaaacagcctattatatgctacatacatcacaattaaaaaatatgaaaatgttaaatcatgccatgcctatattattagtttcaggatatgacgatcctttaggtgattatggtaaagggattttaaaattggcgaatatatatagaaaagctggcattaaaaatgttaaagtgaatctttatcatcataaacgtcatgaagtgttatttgaaaaagatcatgacaaaatttgggaagacttgtttaaatggttgaatcaattttataaaaaataaagaaagtggaattaaatatgaataaaaataa

SEQ ID NO: 546 - DNA, 956 bp, Staphylococcus aureus
  marker
attgccatttttttaacagctgtcttttgtatggcactagatttaacacccatctatgccattttaacagctgtagtcacaattgaaccaactgccaaggcatcacttattaaaggttatcgtagattacctgctacggtaattggtgcaggctttgcagtattatttacatatttattcggcgatcaatcaccttttacatatgcattgagtgcaacgttcacgattttattctgtacaaaactcaaattgcaagttggtacgaatgtcgctgtactaacatcattagctatgattccaggtattcatgatgcctacatattcaactttttgtctcgaacattgacagcaattattggactcgtgacatcaggtttaattaacttcatggtgtttccacctaagtattatggtcaggtcgaagaaaaattaagtaagacagatgccttgatgtataaattattttacaatcgctgccaagaacttatcttatcaagactgcaatctgataaaagcgaaaaagcatataaaaatattttcaatttaaacaatcaagttgaaacgttaataagttatcaacgtgatgaattaagctatcataagaaaaaagaatgtgattggaaattactcaatcaattaactaaacgtgcatatacgaatcgtttgtttatcactcatttatcaaatatcatttacttgcctaaaaatactcgtgttaacttttcaggtgacgaaaaaatggcattgctaaaaattagtagtagcatcaaagatatattttatgatggttcttttaagagagaagatgattctgtagaaactttacgttcgacaataaaagcacttgaaattagtggtgaaaatcaaattaaaagtcatatactatacgaagttctaatgatttatcgactgctagacagcagatatgcttaatttaagtaccttatgctaattgg

SEQ ID NO: 547 - DNA, 748 bp, Staphylococcus aureus
  marker
aatacgaagaggacatcataagaaatgacatttccgtcatcttgaaattttgaatgtaacaatattaaactaaccttaaaattttagatagaaggggttagtttaatacttgaaatatgatttgacaactcaagacagtacaatcaaacgtaacaattcaataaatgataaagacttcgaaaagttagtaatggatctacaaccattaattattcgacgcatcaaaacatttggatttaatcattatgatttagaagacttatatcaagaaatacttatacggatgtataggtcggtccaaacatttgattttagtggagagcagcctttcacaaattatgttcaatgtttaattacgtctgtaaagtatgattatttgagaaaatatttagctacaaataaaagaatggataatttgattaatgaatatagagttacgtatccatgtgcaataaagcgttttgatgttgaaaacaattatttgaataaattagcaattaaagagttgatttgtcagtttaagtatttgagtgcatttgaaaaagatgtcatgtatttaatgtgtgaacaatataagccgagagaaattgctcaattgatgcatgtaaaagagaaagtgatttataatgccatacaacgatgtaaaaataaaataaaacgttatttcaaaatgatttgaaaagcgccttaggacgtgaattgaattataacgtgttacttactgatggtttgacatttgttataaatt

SEQ ID NO: 548 - DNA, 737 bp, Staphylococcus aureus
  marker
tttgccgaaaaagattgctgacatggtaaaagatgggcgactgacaagtgcacatggacgaacgttattggcaattaaagatgaacaacaaatgcttaggttagcgaaacgggttgttaaagaaaagtggagtgttagatatttagaaaaccatgttaatgaattaaaaaatgtttcgtcaaagtcggaaacagacaaagtagatataactaagcctaaatttataaagcaacaagaacgacagttgcgagaacagtatggtaccaaagtagatatatcaataaaaaaatcggttggtaaaatctcatttgagtttgattcacaagatgactttgtgagaataattgaacaattaaatcgtaggtatggtaaatagttacacaattttatataataactctttgtgaatctatagatatattgatagttatctatattaaactttgaagatgatgcgacttcagtaggttggaagaatacaacaatattaataaaattatttgagactatatagaagggagtaacgctaattatggatcaagttatgagtattatttcatcgctattcgaaccattaactaaaattgaaacatatgaaaacattgcaactaaaatcgctatgattgttatttatattatcgtagccctcatagttattaaaatactgaataaaatgattgaacagggatttaagattcaaaataaaagtaaaaagagtaacaaaaagcgctctaaaa

SEQ ID NO: 549 - DNA, 737 bp, Staphylococcus aureus
  marker
atatcaacgcgtagaacattttatgaatcatgttgtcaatgaagatacacaaaaagatgatattgtcattgttgcacatcaagttgtcattcgttgtttgatggtttattttaacaaagtttcaagggaagaagctgtggatttaaaggtagaaaattgcaaaccatatatcattgaatagaagtatagaggttctgaaaagctgtgttttatagcggccttcagaaccattttttgcatttggaatttaatgggaatcattcttatcaacagacttaccaccaatagctaatgtgataattgcgcttgtgaacaaaataattgaagttataaatgacgctaatgtaaaaggtgtaaattgtgtgagcgataatatcaatgataaaaagaaccaagagatagcccctagaaattgtaaaatagcagaagaaattctaaaactcatataatcatatatagctaaaacaagtgaaggtaatgcgactaataccattataatgatgttgagggtgaataaatatggctgttcaaaagttactgtgtttggtcctgttggatgcattgctgctaagaacaagcaaacaatcgtcgataaaattgctaaaataataaaagtaattcgaactttcatcatgaccatcctttgtttatagagtcaatataagtatggaatatgttagggatatagtcaaatgcgtcaactaatgggagattttggcatagatagagaatttaag

SEQ ID NO: 550 - DNA, 612 bp, Staphylococcus aureus
  marker
tacatcactgtcatacgaacatatatttaaatagaaaaaaatttattttaaagattataactactcttaatcattttagtgaattaaaaaaagtagtgcaaaaagcaaaatatactttatacactacaaatcatttatttataataaagtttcaccaaaaaatgttccaactaatgaaaccgcttgttcagcagtatgattattactgtcaatcaatggatttacttcaactaaatccattgaggaaattaaatgtgattgatgcagtaattccaatgcaaaatggctttctctataactaagaccacccaaaactctagtaccagtgcctggcgtttcaagcggatctaaagcatcaacatctaaagataaatgaacgccatcaacattgcgtgacttcaaatattctattgtattttcaattacttcctttatccccaatttatcaatatctgacatagtaaatgttttaatattatgatctttgataaattgtctttcacctttatctaaatctctcataccaattagtacgatgttttctggcttgattacattactatttaattctaaaagttctttgggaccttcgcctgtcaaaatccttagagg

SEQ ID NO: 551 - DNA, 596 bp, Staphylococcus aureus
  marker
tgtgcccaagcctttaaatgtggctttgataccattgcggccgataggagtttcaatatcacaagataactggcttaattggttaacaatataatcatgtgtttgaaattcttcaaaagataactcaggatattggtgtaaataacgtctgagttgaattgttttattttctttattatttgctagttggaaccaatctaacacccttatcactactttctaaaataatgtttatagtataacattttatgaaattatcgtactaaatgattgctttgagatattttatctatgaatgataaggctttcaagttatgtagaattactgtatgataaaggtattaccaaacaatacttaagggggattatatactgtggttcaatcattacatgagtttttagaggaaaatataaattatctaaaagaaaatggtttgtataatgaaatagatacaattgaaggtgcaaacggaccagaaatcaaaatcaatgggaaatcatacattaacttatcttcaaataattatttaggactagcaacaaatgaagatttgaaatcagctgcaaaagcagctattgatacacatggtgtaggt

SEQ ID NO: 552 - DNA, 579 bp, Staphylococcus aureus
  marker
aacctaacaaatattaaagtaaatttaaaaggtagcggttttgtgtcccaccaatcaattagtaagggacaaaaacttactgaaaaagataaaatagacgtagaattttcatcagagaatgtagacagcaattcgacgaataattctgattcaaattcagatgataagaagaaatctgacagtaaaactgacaaggataagtcggactaacaagaatggctacattaaataagggtgtattgtcactatttgtttttactaaagtaatgctgtgatagaaaaaaacatcttcatttaatctttataaataagtgttgatagagaattttaaggtagacgaggtcagattaacttgtttgttataggcaaactttttatactggcctcttatgccgtaaaaaagaaaaattataaattttgattacaactttgtttatttaattgaaaaattgataatatattagtggttaaaaaagtctggattaagaagaggagatagttatgatttttgtatatgcgttattagcgctagtgattacatttgttttggtacctgttttaatacctacattaaaaagg

SEQ ID NO: 553 - DNA, 539 bp, Staphylococcus aureus
  marker
cattgctgaacaaacttcagaaactaaaacaccatcgcaagcataattataaaacagtccaaaacaaattaaagttttagggctgatttttttagtagcattgaactatagaaattcgtgaaagtatccatcaacgaaacaatctaataaaacaatcatcaaaaaaaaggatagttaagaattatatgtaacaagttaatgagcctacagcgatagcataaaggtatgaaatttttataaaggttttttgtttgaagatactagcaacttacgtcaaaataaaataggtctatataatattgtgataaatctagagaaaagagtttactaagaaattattaagattttatctttgaaagataccgactatcaacatgatgtaagtttattttataatattcataaaaaataaatctggtaaaacagtttgcgttagtagtcatgttaaaatacaaacaaatgtaactcacatttaatttgtcataatgggaatgtgcgtttaaaatagatttgttcaaaggaaagtggaggtgcaattt

SEQ ID NO: 554 - DNA, 527 bp, Staphylococcus aureus
  marker
ggctgcaaaactaggtttcaaacgtgtaattattcctaaaaataatataggcggatggacatatcctgaaggtatacaagtaataggtgtaactactgtacatgaagcattgtcatttgctcttcattcataaaacatcaagaaaggaggacattgtgtgaatatcgttaaactaatggttattattatttacttaattattgggagcgcattaggaataattattattcctgaaattgcaaatgatcttggattacaaaactccagctttttaaaaaatcactatgtagatggcattatcggtagtatttttatgttcttaatttttggtgtatttattagacgagttactaacgctataaaaggtttagaacattttattatgcgtagaagtgctgttgaaatactattcgcaacaataggtttaataatcggattacttatttctgttatggtgtcgtttatattagaatcaattggtaactctatttttaatcatttcattcctgtcataattacgatattac

SEQ ID NO: 555 - DNA, 520 bp, Staphylococcus aureus
  marker
cggctcatttgtatcattcattttcttagcgttgttattagtgccaggttctcctgcagcactgactgcaccgtcttatattgcattacttggatggttaatcatcggtttaatattctttgtgattcgatatcctaaattgaaaaatatggataatgatgaattaagtcgcttgattttaaatagaagtgaaaatgaagttgatgatatgattgaagaacctgaaaaagaaaaaactaaataataaaagaatcgcacaatataccttcttcattcggaggcgtatcgtgcgattttttgtattataaattgacatttaagacgaggcagctgaaccttatatataattgctaagagttagggctgagccatttctaacaaatatttataatcgtttaaaagatttcacgaacccagaaacaattaatttggaaatttggtcggcgaataataaacctaatgcgatggcgcctgcaataagtgtaacctctagcatggtattgattgctgtactgaaatt

SEQ ID NO: 556 - DNA, 467 bp, Staphylococcus aureus
  marker
aggtaattctaaatattctaggaaacgattccgaatgtaacgtaaactggatgacagtgtttgtaacaaagctgttactttcactgtaaccaagtttttttgcaatacgtgtcatggtatcttctacacgcgtaccttctgcaccagattctaatagtatgcgagcagcaagcatgacaacgtctttgataagtacctcttgtttgtattcttctgaatttatgtccatttcatcaccattgtttataagaatttaatactcattatagtttatacactataaaataaccacatgagctttttgataagttgttattgattttaaaaaactaatatttgatactattgtaataataatcatcggaatttttagtagttaaaattctcttgaagtataaaaaggaaaaattattgaaaaaaattcgacaaaaatatgtttcaaatatttcaaataggttaaaataata

SEQ ID NO: 557 - DNA, 453 bp, Staphylococcus aureus
  marker
ctgacctttaggtatattaaaagaaacatctttcaatgtgaaggatgcatcactttgatattgaaatgaaacatttttaaatacaataactgaattcttatcctccacttgtctctctcctttacgattcgtgtatctatcatattttacaatatttataaatcgctgtatatgacattgactgggtttgctatatattactagtattttctgactcatttctagtctttaaagtgttgtttaacaactaatgataaggacatttattcctctctaacaattatgtataaacgttaataaaataaatgatttactaatataggggtggtcgcgtttgattcaacgataatactttcacttcattcagttctagtgaaattgatcaaactagcttgatcataatttttagattcgcactcaaaaaagtagatataaagaaatcggacttaaaaa

SEQ ID NO: 558 - DNA, 435 bp, Staphylococcus aureus
  marker
ggtgctactttaatttcatataaactgtataaacattatcattcgtttatcaaatcaattttttatgaaaaacaacactcttttaatattagacaacccaattcaatattatgattatgcaattttaattataaaaatttgctcatatccaaaaaatacgaaagcgctttctatattggtatgcaagtatttcaaaaagaataaatttaattttcctacttttctaaacatttatctttatgtataatgttttcaagtaactaaattataaattaaataaagggagtgtttatcatgcttacaatggggacagcattaagtcaacaagtagatgccaattggcaaacttatattatgattgccgtctacttcttgatactaatcgttattggcttttacggttacaagcaagcaactggtaacctaagcgagtac

SEQ ID NO: 559 - DNA, 424 bp, Staphylococcus aureus
  marker
gtttgtgaaattgtaattggtatcttgaagttgaaaaatgaattattttttaaataaagtgtggttaatggttgtctgactcatttagaatacataaaatatatttaactgttgttatcaaataaaaagtgatgtgagtgaattgtcaaaaagtgaagatcaacgtattactaaaacaaaagatgaacaaattaagcaaatagatatatcggatatcaaaccgaatccgtatcagccccgaaaaactttcgatgaaaatcatttaaatgatttggcagattcaattaagcaatatggaattttgcaaccaattgtgcttagaaaaacagttcaaggttattacattgtagttggtgaaagaaggtttagagcttcgaaaattgctggtctaaaatacgtatcagcgattatcaaagatttaaca

SEQ ID NO: 560 - DNA, 418 bp, Staphylococcus aureus
  marker
acttattgctgatactgaacctaccgcaatagaatgatctccaccaagaactagaggaaatctgttattttcaattgatgctgaaacctctttatttaatttttgattaacatctataatttcatcataatttcttaatcctttttgttcactatgaaatttttcaatgttcacagcaggtaccttaatatcccccttgtcatatacatcaaggtctaattgctttaatcttgaaattaatccagcatatctaattgctgttggtcctaaatcaacacctaattttctttgtccaaatgttgatggtgcacctataatatcaattgcttttgtctttgtcataagcgtaccccctttgctctatgtaattaaagaataatgtatgcgcttaccattatcaagcaatagctacaacata

SEQ ID NO: 561 - DNA, 403 bp, Staphylococcus aureus
  marker
caaagcgaatgcctatttagagtcagtaggaaaatcaccaattaattggtgtgaaagtgaggcgtagatggtgaatagagaaactttaatagcacgaattgagcaagaattagtacaagcagagcaggcacagcatgaccatgactttgaaaaacatatgtatgccatacatatattaacatctttatatgcttcaacatcaaatacaccacatattggtgaacaacaaatgaatcgtcgtattgctaaccataatcaaatgccacaatcacaaataacgcagccaactcatcaagtgacagctgctgaaattgaagcgatgggtggtaaagtaaatacgcattcagcacatcatcataataagtcatattcacaaccttcaaaccaacaacaaagattagcg

SEQ ID NO: 562 - DNA, 394 bp, Staphylococcus aureus
  marker
aacgatggcgtaatatttaccttgttcaaattctgtattaacatcatgaatagcttgatgctgatatggtgtccctttttgataggtataacttacattgtcaaaccgtatagtcatagttgatccaccagcccttcataagttaagaatgatgtttggtgtcccagcatttgatttattttgattgggaatggcaaatctagacctattcttgttaactcttctgcatggtcgaaaatttcagtcgctgtgccttctttatagacagtccctttattcataacgataacatgatctgcttccatcgcctcagataaatcatgcgtaatagaaatgattgtaatattatgttctgatttaacttttctcactaaatccaataaattttgacgtg

SEQ ID NO: 563 - DNA, 387 bp, Staphylococcus aureus
  marker
ttgaattgataggatggagcgaatggaaagtagttacagtattttgggctgttggtctgatttcaggtttaatcggtttatggattggagtgcattaagatgcttaattatacagggttagaaaataaaaatgtattagtcgtcggtttggcaaaaagtggttatgaagcagctaaattattaagtaaattaggtgcgaatgtgactgtcaatgatgggaaagacttatcgcaagatgctcatgcaaaagatttagaatctatgggtatttctgttgtaagtggaagtcatccattaacattgcttgataataatccaataattgttaaaaatcctggaataccttatacagtatctattattgatgaagcagtgaaacgaggtttg

SEQ ID NO: 564 - DNA, 385 bp, Staphylococcus aureus
  marker
attcatttaaagactgagtgaaatgttataattataatgacgagttacaaagtgaagatgaggtggaataatgagtcattattacgatgaagatccaagtgtaattagcaatgaacaacgtattcaatatcaattaaaccatcataaaattgatttaataactgataacggagtgttttcgaaagataaagtagattatggttcagatgttcttgttcaaacttttttaaaagcgcatccacctggtccaagtaagcgaattgccgatgttggttgtggttacggaccaattggtttgatgattgctaaagtatcaccacatcattcaattacaatgctagatgttaatcacagagcgctagccttagttgaaaaaaacaaaaaa

SEQ ID NO: 565 - DNA, 375 bp, Staphylococcus aureus
  marker
acaacagtagagcaaattatcaggaataatggtgccattccagcaaccatagccattatagatggcaaaattaaaattggtttagaaagcgaagatttagaaatactggcaactagtaaagacgttgctaaagtatctagaagggatttagcagaagttgttgcgatgaagtgtgttggtgctactactgtagcgacgacgatgatatgtgctgcaatggctggtattcaattttttgttacaggaggtattgggggcgtccataaaggtgcagaacatacgatggacatttcagcagacttagaagaactgtctaaaacaaatgtcactgttatctgtgcaggtgccaaatcaattttagacttacctaagacg

SEQ ID NO: 566 - DNA, 364 bp, Staphylococcus aureus
  marker
gatagtttaatgaaatataagccatacgtcatgacccctttctaattctactttatcaacattttacgcttaaacaattcactttaaaatcattttcaacaaaaaaaaccgaatacaaatgtattcggcctaaaaaaagtatttacgctttttctttatgatcttgcttgcgttttctaaacaatagtaatgatcctaataatgccatcattgcaccaaataaagttgcatttgtgttttcgctcttatctcctgtttctggtaaagcatcagttttgtgttgttttgataccttattagaatggtttacttcacctttaggatttgatggtgctttctgttcattatttggtggtgtaactct

SEQ ID NO: 567 - DNA, 342 bp, Staphylococcus aureus
  marker
tgtgatgtatagatgtgtattacatgtaattacattgtgatttgtaatctaatgatagttacgcaaaattaatgatgtttatcaaaattttacatgtacgattagatttgtaatacataaaaattgccttcagtacattatataacctttgttagatgaataaaaatcgttatttgtaatactaagtattccaaaaatgcatgagtagattttgtgcgttgtgattatgagggatgttggattgattgatgtggaggattgttacgataattttgggatgaggtgtttagtcaatggcggtttgaaattgtcgttttatggtgggctgaaaatgctgtttta

SEQ ID NO: 568 - DNA, 328 bp, Staphylococcus aureus
  marker
tgctggtattattttctttagtggatcattatatattttagtattaactcaaattaaagttttaggtgcgattacgccaattggtggcgtattgttcatcattggatggataatgttaatcattgcgacattcaaatttgctggttaaattttaaaactttagattacctatgtaactaaacattaaatttttaataaaaataatcaagaaaaagagttacaaactcatcttttgggtatagaataccttcgaggtgagtttttatttatggaaaaaaagaataagcaaatagatagaggcgatttaaaacaaaacctatctgaaaag

SEQ ID NO: 569 - DNA, 317 bp, Staphylococcus aureus
  marker
cagtgactggttcaacaaagaatttgcttaaattctactacttattattttctctactcatttaatataactcaaatcaaaaataattaaacattttgtatataaaaagttaacagatttgccataaaatcatacgaacggagtatgaaatgaacctttatcttctataatttaaaaaaatgagatttatgcatacatctgaccaaatgtgcataaatctcatttctttatattaatcttggcaagactcacatacaccataaacttcaagtttgtgtttgtgaatattaacaccaggtagtgataattttatctga

SEQ ID NO: 570 - DNA, 316 bp, Staphylococcus aureus
  marker
ttatatgatacaccccattcatatttattacttcgccttaaacaatgatttaggtactcttgttgaatagtatttgtcccacaccaatcatacgtccgtcgacgataaatatttatcctgtcgtcattaatcgtaatattaattttacttgagcgagtttaatttgtatactattcctacttttaaaacttttacaaaaattcgacctaaatctactgtttcattttttaaatattagttctatgatactacaatttatgaaataaataaacgatgttattaaggtataatgctcaatcatctaacattttcagta

SEQ ID NO: 571 - DNA, 307 bp, Staphylococcus aureus
  marker
tacgttttcagcgttttgaacaatgagacctaagccaacaaagttgagtgcatattgattatttattttaattacatcgtatgtaccaacttgtgcagaaatcatttgttcactagcttgtttatgattaggtgctatatttagcgtttttgtaaaatcattaaaagtaccgcctggtaaaatgccaatagggagttgaaggtcatgtgtcataacaccatttataagttcgttaaccgtgccatcaccgccaagaataaataatatatctacatcttttgcatagtttttagttttgatttcttgg

SEQ ID NO: 572 - DNA, 302 bp, Staphylococcus aureus
  marker
agctttttgtcaatggcaatcagtcattttgtaatgattttttacgatgtattttgatatcgttaccaaagtcttttaataactcattttcatctaaataaattttctctaaatataatccttcagccggtgcagtgaaaggtacattcttacgattctttgattcaagaagttttggtacatcagatacttcatgtcgcccttttccaacttctattaaaaatgcaactaagacacgcaccatgttatataaaaatccagatccagtgacaatataatcaaagccatcatctgtctttacg

SEQ ID NO: 573 - DNA, 298 bp, Staphylococcus aureus
  marker
ggtcgacatgatgatgactcctttcaaagcgttaacctcattataataaaatttataatgtaagtcatacaaatgatgataaaactataagctaaatctaagtttcacgagaaacatttttgtgtatcagcaaattgcgccaatcatattaatacaaaatttaatttaaacactcagaaatgttagtcgtgcgtaaatagtttgtatctctcactctgtgtaatttaatgcagccacatattttccaggaaataattaatcattcaccatccatgttatagcacgcttaatcgcttgg

SEQ ID NO: 574 - DNA, 283 bp, Staphylococcus aureus
  marker
tgcatcgttcagtccacttgtgctatttgcactttactggaaaggtttgacacgtgccggtgctgtaagtggaatggtttcaggtgccttagtcgttatcgtttggattgcgtggattaaaccattggcacatatcaacgaaatattcggcttatatgaaattattcctggatttattgtaagtgtaatcgttacatatgttgtaagtaaacttactaaaaaacctggtgcatttgttgaaactgacttaaacaaagttcgtgacatcgttagagaaaaataa

SEQ ID NO: 575 - DNA, 269 bp, Staphylococcus aureus
  marker
gagtatagatcaaatattaaactttttaggattagcaatgagagctggtaaagtaaaaacaggtgaatcagtcattgttaatgagattaaaaaaaggaaatttgaagctcgttattgttgcaaatgatgcgtctgataatacagctaaattaattacagataaatgtaagagttacaaagttccattcagaaagtttggaaatcgaaatgaattgggaatagcacttggaaaaggtgagcgtgttaatgtagggattactgacccaggc

SEQ ID NO: 576 - DNA, 259 bp, Staphylococcus aureus
  marker
ttttcgatcttatttttgtggacaattagatgtgccgttaacggatactggcacaaaaagtgcagacgatttatgtgattattttaaagagaaacagattaaacatgtatatgtttcagacttattaagaacacagcaaacgtttgaacatatttttccatatgacattgcatcaacgactacccctctattaagagaacgttcacttggcgtatttgagggtgaatataaagatgaaatcagtgcgaatccgaaatat

SEQ ID NO: 577 - DNA, 253 bp, Staphylococcus aureus
  marker
tacgaataaaataattgcaattgggataatcatggttaaagatatcgtatctctcaattgccatttaagctgtctgtagctcgttctcttaacattggcatcataacccctaacttccattgcgaccgctaattcttcggcgcgttggaaagctgagatgaatagtggcactagtaatggaataaatgatttaatacgtgttgcaatgttccctgaacttatttcagaaccacgcgacttttgcgccaaaatg

SEQ ID NO: 578 - DNA, 249 bp, Staphylococcus aureus
  marker
ttgataaggaacatttttgcgtgataaataatcgataaaatctaagttgtcttgatataaaaagtcttgtttaccacacataatgagcaattttggaatttgtttatcttcagctacagctttgtctagcaagtaatacggatcatgttcagttcctttaacacttgaaagattgccaattatggcctcttttgaaaaatcattccactctagatccattaaattttgcgcttcaaacacagcagataa

SEQ ID NO: 579 - DNA, 239 bp, Staphylococcus aureus
  marker
cacaatcccaattaaacgcagtgatatatatagcccttctaaaataccattagtttcaatcgtgatgccatgccattcaactaatacatatccacctttagttaaaaatatatgcatcattaatgtgaagattaaaaagaaaaatattggtgttaaacctttgattaggaaccataattgaatttttgctaatctcataatgaataagataagtgcaaacacccaaagatatgttaatg

SEQ ID NO: 580 - DNA, 238 bp, Staphylococcus aureus
  marker
cgtaaaatgaattaaatatataatgagagtgatgagcattaagttgacttagtttccttgataatttggaagcgcccgcaatattattaatgttattcgctaaattcagagtggaaccgtgcggaagcgcctctaacaatacaatttgtatgttagtggtgcaattttttgatatttaatttcgcaggtacttcaattatgtatttacgtagttcaatcattgaggaggaaatgatct

SEQ ID NO: 581 - DNA, 233 bp, Staphylococcus aureus
  marker
tgataaatggttatcctctgatcttgctaaatcattaaattgtcattgttccgagtttagttgtttaggaccaaatgttcttgttaaaaatatgtactatccgaatatggattttaaagataatgagcgtcatatgcacaaacaaccacaaattatacaattttaaaaactcttaattatgcggagaagcactttatcgataagtagtctccgcatattttaatgctattata

SEQ ID NO: 582 - DNA, 233 bp, Staphylococcus aureus
  marker
ataatcaacaagataatcacattaaattattgaatccattgaccttagcatatatgggagacgcagtcttagatcaatatgtacgtacctatatcgttttaaagcttaaaagtaagcctaataaactacatcaaatgtctaaaaaatatgtatctgccaaaagtcaggcgcaaacgttagaatatttaatggagcaagaatggtttacagacgaagaaatggatattttgaag

SEQ ID NO: 583 - DNA, 229 bp, Staphylococcus aureus
  marker
atccatcaacagacgatgggcatagtttttggcttcatctaaattcattttaaagtttttaggtccaaatatcatttcacgctctactgtgtcctcaaataattgagattcgggaaattgaaataccattccaattctttttcttacaggtctaatatatttatctttggtcttatgtgtaatagtaatgtcatcaactgtaactgtcccagtagtcggctttaacagc

SEQ ID NO: 584 - DNA, 223 bp, Staphylococcus aureus
  marker
gatattagctccctttttaaacttcattcgcattttctgataagccattgtaatcataagtaaaataactagtagaactacaattacaccacccggagaaatgtccatatagaaagctaggactaagcctaatattactgataattcacctaaaaatacacttagtaatatcaattgcttaaaactttttgttattcgcatacttattgcaattggtaacgtg

SEQ ID NO: 585 - DNA, 222 bp, Staphylococcus aureus
  marker
agtgcattgtccgatattagaaacggtcatgtgggccaaattccaaaccatttaaaagatggacattatcaaggtgctaaagatctaggccgatctattggttacaaatatccacaccaatatgttaatggctatgtttcacagcaatatttacctgataaactaaaaaacaaaatttattatgaaccaaaaacgacatctaaaagtgaacaacaactcaaa

SEQ ID NO: 586 - DNA, 200 bp, Staphylococcus aureus
  marker
cttcttgctttgtaattttataaagtggatcaatatcactctgacttacatcaggttgaactgtcatctttttagttactttgttttcaagcgtaatatttgctaatttaggttttacagaataatgaatgtcatcagctaaccctttaacttgatacttctcttgatattttccagctttagcatttgataaatcaatc

SEQ ID NO: 587 - DNA, 197 bp, Staphylococcus aureus
  marker
taaaatactgaaactttgttcattaaaaatgaaagtgttcagttcaccatcttgaggagacaaatcagtcaatggtatacgactaccaccaatgaatggaccatttgctgttagtatcatggtcgtttcgccagaatatgtcttatcatcaaaaaaatattgataattgataattaaattgtgttggatttagcagt

SEQ ID NO: 588 - DNA, 174 bp, Staphylococcus aureus
  marker
gaactattgttatgtttttgattatcttttccagcctggtcatccttatggttaccacaagcagcgagtataaagatagctgtaatcaataatactaatgtacgcttcatcgacatacccctctaactatttaattcattttgcttatctacaaattgttgctctgtccaaatt

SEQ ID NO: 589 - DNA, 166 bp, Staphylococcus aureus
  marker
gacagaggggttaagtgctaatacacttgctatagccacacgctgcttctgtccccccgataatgcattaggttcataatctgcacgttctaacatatcaacttgtttaagtgcttcgctgactcttctatgcatttcgtcatgtggaaccgcatgattttcgagt

SEQ ID NO: 590 - DNA, 157 bp, Staphylococcus aureus
  marker
tgttttgtgattatctgaagttggctttggagcttcagttttattgctatcagttgattgtgcttgaggcataggcattgccgcagcttcaactggcatttgtgagatttgtggcgtgataatctcagtttctttttctttcttaagcgtcactttg

SEQ ID NO: 591 - DNA, 154 bp, Staphylococcus aureus
  marker
agcggaaatgaaaaagacaattcatgatatattggatttcagagatgaagatatttggatgttatttggtactttgcctgtgtttccatgcttaaaggatgatgaagatcaaaagttactatcacgtttaagaaatgctaaaaatgtaacgact

SEQ ID NO: 592 - DNA, 142 bp, Staphylococcus aureus
  marker
aacggcttcaagtacataaatagcacctacagttaatagtatcagtgacactaaaagtcctaatactttcaaccatgctaatgatgtatcttcttgcccaacgaacgcagtttgtccaaattgaattagactggctggcaac

SEQ ID NO: 593 - DNA, 139 bp, Staphylococcus aureus
  marker
actagttaaattcttattgccagatgtcttaaataatgggaaactatacaccattgcgggctgggacgtttatattacggaaatcattattgcgaccgtattactacttgtattcatgctagtaacgattcgtggcgca

SEQ ID NO: 594 - DNA, 133 bp, Staphylococcus aureus
  marker
taaaaaaagtcgcttaactggaagattatccggcaatattggttatgttgcatctaaagtagcacaagaagtaaagcctacagattatttagttacagagttgtcgtcattccagttacttggaattgaaaag

SEQ ID NO: 595 - DNA, 124 bp, Staphylococcus aureus
  marker
aatcgtcgtattattgatgttctttggttcattctttggtaataattttgcacttgaaaatttacaaccgttagctgaacctagcaaaggatggttagtgtctattgtggttattgtatccgtg

SEQ ID NO: 596 - DNA, 122 bp, Staphylococcus aureus
  marker
aatattcgagggagtatatcatgagggaaaattttaagttacgtaaaatgaaagtcggtttagtatctgttgcaattactatgttatatatcatgacaaacggacaagcagaagcatctgaa

SEQ ID NO: 597 - DNA, 121 bp, Staphylococcus aureus
  marker
gcaatgaaaacaataactgtaatcacttttatcaatgccaaccagtattcactttcaccatagacgcgaactgataacgaattcagactaaaaattataactaaaaacaacgcactccatg

SEQ ID NO: 598 - DNA, 119 bp, Staphylococcus aureus
  marker
aaatagtcacattaactgtttcaggcgcttttgttaaatgcaaatctttagtgttataaagaatttcaacgggtacatcttgaatcgttttactagacttttgaccaagattaccagtg

SEQ ID NO: 599 - DNA, 108 bp, Staphylococcus aureus
  marker
gcttttgatcctgataagaaatataaatctggacatagagatattatgggttcacgtatttcagactggaatagagtcggttggggtgaaatcccaatgtcactcgga

SEQ ID NO: 600 - DNA, 100 bp, Staphylococcus aureus
  marker
catcatgagctttgtgttaggagaaacggcaattggtattttctgtatcattatgttgtttgcacttttaggatttttaccatataacattaaccctgct

SEQ ID NO: 601 - DNA, 100 bp, Staphylococcus aureus
  marker
gtaagcagtgtatgacgttcttaatttttcaattagaagcgcacctactattgcgaataagattccaaaccacattggattaataaatactagtgttggc

SEQ ID NO: 602 - DNA, 3019 bp, Pseudomonas aeruginosa
  misc_feature (2554)..(2639): n = a or g or c or t
  marker
cctcggcgccagtgttggagacgctgcgccgacagttggcaactgtctgagttgtcaggcggcatttgagacgtacgtctcaaattggcttccatctgacatgtaggaatcacaaaaccgggttaagacttcaggcttcactcactctacgagcgctgccgatgaaaaccttcgcccgcctggccgccggtctctgcatctgcgccatcgccagccaggccaacgcctggtcgcaaccgacccacaagaacatcgtcaaggatgccctggccttcatgaactcctcctacgccaccgaggagatgcgccaggcctaccggttctacgtgagcgccgccggcagcgaggcgcaggccggggagatcctcggccaggcggccttcgacgtggacgacttcaaggacacccgtctcggtggctggtgggtcggctacgaacacgcgccgctgtggggcgcggcttcgggcatcgtcaactacacctcgtactggcacttcctcaacctggcccgggacggcgactcccatggcaacccccacggcggctacgactaccgctaccacaaggtcgacggcggcatcgccgacgtcgactggtacgccatggtctacctctacaaccgcgagctgaagcgcgaggacttcgacaccaccgaggcgcactaccgccagggcacccgctcggactggcaggagcactacggcgacttccagaccgccgccttccagccgatcgataacctcgccacctactggttcgagcagttccgcgccgcgccttcgctgcagaccatcggctatgccctgcatgccaccggcgacgtggcccagccgcaccatgtgtggatcacctcggccaacggccattccagctgggaaggctgggtcgacgaccactacgccagcgagaagctcaacgacccggcggcggtggccaacctggtggggcgctacgatccgagcaagagcatccgcgacctgctcacccagaccggccaggtcgcctacgcgcgccccgagccgctctacgacaccagctacgagacgcgcctgcgggtggcgaaggagctgattcccgagtccatcgccctgaccgtcaccgtactgaccaagggcgccaacagcttcgatgcaccgactgctctctgatcgcgcccggggctggcgtcgcgcactgtgcgggatcgtcctcgggctgctggcgtggagcgcccatggcgtccccgccaaggcgccgcaggatctgcggatcgacggcgaggtgctgccggggagaagcatcgacttgctcgagcaggccctgtcgcgggtcaagttcaacaccgacccgcagcagttgcgccgtggcctggtggaaaaccgcctgctggcgcgcgcggtggaagaccagctcaccgcgcagagccgcgccgatctcgacgccagcgtggagatcgaggccggcaacctgctcgaacaggtatacggcaggcgctaccgcgaggacctcgggccatacctgcgccagccccgggccctgagcgcggagcgtttgcgcgaggtgctggcgccgaggagccgcggcctggtggaaaacagcctgctgctggacgagacgcagcgccgcgaggcggccggggtcgagctgatcggctggcagtttcccggccagccggcacaggtcctcgacctgctatcgctgtacgaaggcgacaacgtccagggccaggtggaattgcaacagggcaacctcgcttacctggcgcgccaggtccagacccgcatccgccgcgactacctctggtaccgcctggcccgggacggcttcggcccggcagagcggcagggcgtgaggaccctggtgcgggacaagctggtgcgccatcgctatctgcaccagatcggcctctacagtgatttccaccatgagtccgatgcgctgcgggaactcgccggcaaggtcagcgacaaggacgccgaggcctactatcggcgcaacctggagcgttaccgcaacgtcgcgcaggtgcaggcggcgcatatccgcctggccgaccaggcgagcgcggacaaggtctacgccgagttgcgcggcggcctggccttcgacgaggcggtacgccgctattccctggccgacgacagggaccgcgacccgcccggcgacctaggcctgatacggccccaggacggccggctcgacctgctgcgcaagactgcgctgatccagaaggccgatacggtttcccagccgatgcgcatcgacggcgcgttcgagatcgtccgggtgcgtagccgcgaggatcgccagttgcccctcgacgaccgcagcgtgcgcttcgaggtgaaccaggcggtggcgcgcgagcaactggcagcgcagttcgagacgcgcctgcgcaacctgctggccggcgccagggtggaaggcctgtgaagcgctggctcggcgttgccctcggctgcagcgggctggcgatcgccctggcctgcgccggcgtgttgcaaatggcgcctgccgatatggccgcttcctcgtcttctccgtcgccagccaggacggttgcggcactgcnnnnnnnnnnnnnnnnnnnnnnnnnnnnnnnnnnnnnnnnnnnnnnnnnnnnnnnnnnnnnnnnnnnnnnnnnnnnnnnnnnnnnngaactggatcgcgagcaggcgatccagttcatgcagatgctgcgcgacgagggcgacccgcgcagcccgccgctcggcggcctgcaaccacgccagggcgcgacggcgcaggagctggccgatccgaagcagtaccaggccttcgaggaacgacagacccgcgaactggtacaggcctacaccagcggcgtacagcagataccggaaatccgcgcgcggatcgaggcggccgaacagggtggcgagcgcagcgccgaggaaatcgacgaggctcgcgccgcccttggacagttggagatgatgcgcgacaagctgcagcgggaatcgccgcaactgctgcccggcgacagcgcaccgacatcgccggcggcgccctgagc

SEQ ID NO: 603 - DNA, 2894 bp, Pseudomonas aeruginosa
  marker
gatgtccggctcgacggccagggcgcgccggagcgtctccgggaacagcccggaaaggccggccagggtagcggcctgggcgccgtgcttgagaaaggttcgacggcggaatttccagttttcggtcatcgttttatttcccgggtggttttttgatttccatcaatctgcgtacttcttgtttcgagatgattaatcgtcttcgctgtttttccggcagggaatacagcgagccgatggtttcatggcgataatttatcggttgatcccgaaagcgacttcgatatgaccttgagcgacaacttgagaagatttttcaagggataaaaacaaagggcatggaaatggagttccatgcccttgtcggctgaatgaaaggtcacttgttcatgtgttttaaatcacattttatttgacgactttcatgcgtcataaagttggctggcgaatctcgcaaccttggctggagcccgctagggagtggtgccgagcacctcgaaggagcgggtcgagccgccgatttcgctgatcttctgggtccagaagttcttcgcgttgccgtagtgcctgatgtagtaatggccgggctcggtccctggtggaatggaccagctgatagtcgctttcgaggcagatatacccactctctcccagcggtattgagtatcccagtcattatcggtggcaacggtctcgggcgtctgtttgccatccttgccgatattcaccacttccaggaaagtcttctcggtgcgcaagtcattcttcggatgtccggtcacgaaagcgacggtcaccttgtcgccgatgcgataactttccctgggttgttgcaacacgtcgccgaaggacttgccgatatagggatcgtcggccactactccggtctggaagttcatctggcagcaggacaggtccggcgctatcgccgaggtttccaccggcaggcgttcgcgcagcgccaccgccatgtcgacgaacaactgctggtaggcggcctgggtccaggggccgtagagggtcgagccgccttcgtattcctgggcggcgtattcctcgcgggtggtgacgtagctggcataggcattcgcgtagccattgaagaccacatggcggataccggccgcttcgctggccgcctgcaccgcgcggcggatccgcaccccggccatcacggtgaactcggcgggggcgccgagcagttccaactggccgatgcggaacatctggatcggcagcaccgtcggcgtccaggggtagggtttcttgttgccggtgtcggcgaggatggtcttttccgcctggcattgcaccagttcctgcggcggcacgccggtgagcaacccgccaagggccgagaggaacggattgttgccttcctccagccccagcgggcctggaccgtcttcggtgctaccggcggccaggctggtgccgatggccgcggtgcacaactggcgcggctggccgtcggtgaactccgggcggatcggcaggcgggtgaagtcgacgaaacggaagcgcgaatccagttcgccgagcacttcctcctgggcctggccggcgatctcgtaggccttggcgaattggcgcagaccgatctcgcgggtgttgtcgaactcgttgtcgaagggaccggagccgggcttcaggttcaggttgggcgacaggttgccggcattggtctgggcgaaggcggcgacgaaaccgctcttgcggctgacgtcgtgctcccagtgataggaggcgtagcccttgttgtccggggagatcaggtgattggcgttggtcatcgaggtgctgtgcaccgggaaccaactgatcgcgccggccagctcgccgttggcgtcgacgaagctgagcacgctcatctgcgggtcgatgccatcctcgtagccgacgatgtccggattcttcaggtgcgacagcagcgaacggttgcggttggcgttgcgcagctcgccgctgccgtagaacaggcggccgggctgcaacctggcctgggcccgctcgatggagcggacgatgccgtcgacgatggcgttgaaggtcttttcctggaagccgagcaccgacaggttgtacatcgcgtagtgggagaagccgcccggaccggagtgggtgtgggtggcggcgagcatcacgttgttctcgtcgtagacaccggggtacttcgccttgagccgggccaggaccttcaggtgcacggcctggaagatcatccccaggtcggtgttgacgtagaccaggcgacgtccgctggccgcttcctcgatcacgaaggcacgcgcccactggcgcatgtggatgccggcggtcttctgttcgagggaggagtaacccatcatgccgacttcggcggcttcgccggtgatgtccgccttgcccaggccgaagcggtagggcaggtcgtcggccctggcaggcatggagagcgccagcaggacgcaggacagcaagagcgcggtgaatgcggaacgtgacatggcgaccctcttcttgttttccgccgctgggcggagctggggacggtggtcatcgaaagcgggccggagcctgcttcgcctggttgccactgtagtgccagggtggtggagtcgaaggggggcgtagcggacaggaagggggtgagcgccggccatcctgcatggacggcaaggcaggcgggtaaaaaaaaggccgcctgcgtggggaaggcaccggcggccagtcaggttcggcagcgtcgagccggtctgcaagggctggcgcaggtctcggctgcggcctgcgccgacgctcccgagggcattcgtagtgtgcccgacgccggctgtcagggcgctgacgcccgcctgacaatgccgacagcggacaccgggcgcatgcttatttcaccagcgccctctcgcctt

SEQ ID NO: 604 - DNA, 2893 bp, Pseudomonas aeruginosa
  marker
gccacgcgcttccgctcaacgcagttgatcgccgaaaacggcgaatgggcaaatatcttgcaaggcgcccgccaggccccgttccgcctgtcctatcccgcatttgcaggatggcagcgcggcggcggatggccggatactgcgtacgtcacccagcgaccgcccaggcggcgggacgccgattccaagaactataaaagtgggacgggggagagaatgaaagggagcactgacccgcattcgtcatccgcagccttgctcgcggcgttcggcgccgccgtgctggacatcaaccggctggcgcgcgacaagaccctggagcgtttccatcgcaccgcgctggaacgtctgcagcaactggtgccgttccagcgtgcctggtggggccgcgcggcgctgatcgacggcgtgccggtggagcacagcgcacacctgttcaacctcgaagagcactatgtcgaggactggaaatcgatcagccacgacgacatcaccgtcggcctggtacacgcccgcccgggcaccgccgtggccgtcgacatgcaggccaccgccgggctgcgctggcttggcgcgcgtcacgacatcggtgagctgctctgcgtgatccacgtcgatccgatcacccgcctcagcgaccatgtcgccctctatcgcacgcctggcggcccgcccttcgcggaccaggagaagctgctcctcgggcaactctcggcgcacctggccgcggccgtctcggccaaccagatccgtaccctggtggccctgcgcgaatccctcgaacgccaggctctggccatggcggtatgcgaccgctacggcgtgctgcattgcgccgaacgcggcttcgtcgacctgctgctcggcgcctggccgggctggaccggtccgcagttgccggaggaaaccagcccgcagggctatcgcgatgcgcgcctggtgatcgactcgcggcaggtcggcgacctctacctgctcaccgcgcggcaaccgagcgcgatcgaacagttgagcaatcgcgaaggcgacgtcgccctgctgttcagcgaaggcaagacctacaagcagatcgcccgcgacctcggcctggcgccgaacaccgtgcgccatcacatacgcaccatctattccaagctcggcgtcaacgacaaggcgagcatcgcccacctgctgcaccagttcccgcctggctgacagccctccaaacccctgccatcaccgcttcgaccgccccgccaagggcggcatgggcgccctttcgcctgcgaaaaggcgcaaccaccaccggcgcgacgaacgccgggcacacaacgaccggggagaccgacacatgacccaccgcaccgcctcgatggccgcaccgaccgccagcgccctcgcgctgctcggcatccagctcctgctgggcgccgaggccggcgccgccgacctcaacgcccgcgacttcttcggcgccccggcgggcaccacgctcggcgtgctctacctgccggcgacccgcgcccatgagttccacgggccggccgatcgcaacggcaaggccgaactgaagaccaacgcggtggcctaccgccaggtgttcttcagcgacatctgcggcactctctgcacgccgcagttcatcattcccttcgtcgacatcgatgcgcgcctgcccggcagcgccgggcataccggcgagaccggtttcggcgatccccaggtcggcggcaccctgtttttcgtcaacgacccggaacggcgccgctacagcggcctgctgaccctgatcaccctgccgctgggcgagtaccacgcgaagaaccccgatgtctcgcccggcgccaaccgctggggcgccaccttcgtctacaactacacccagggcatcggccgcgactgggtgctggaagccaacctggaagcgcagttctacgcgaagaacgacgactacttcggcagcgacctggaacagaaaccgctctatcgcctgcaagccttcgcctcctacgacttcagccagagcacctacggcgccctcaagctggtgcacgccgatggcggcgaactgaagctgcagggccataccctcgacgacacccaccagcgctacacccaactcggcttcgagctaggccactggctggaccggcgcaacagcctgatgttcggtctctcgcgcaacgtcgccaccgacaatgctttccatggcagccaggccctgttgcgcctggtccatgtgttctgaggaggcgcagccatgagcgcttccgacaagactctcgccagcgcctctccggcgtccggcaacctcgcgctgctcgcggccatcgtggtgttcgccgcgatcaccccgaccatcctgatgaccgcccccgccgtcgccgcgcaactggcgacccagtggcaactgagcccggcgcgggtcggcgacctgttttcggtggagctgggcgccatgagcctggcgacgctgccggccttccattggctgaaacgcgtcgattggcgccacgcggcgctgctcgccggcctgctgttcatcgccgccaacctggcctcggcgctggccggcagctacccgctgctgctcgccctgcgtttctgcagcgccctcgccggcggctcgctgatgatcctctgcctgtccagcgccgccagcaccgccaccccgagccgggtctacgggctctgggtgatgggccaactggtggtcggcgccgtcggcctggcactgctgccggcgctgttcgaacgcttcggcctggccgcctgctacctgttgctggccggcctgatgggcctcgccctgccgttgtcgcgggccttccccagtggcagcccgccagcggaagcccgcgccagtaccggcgcggttcactcgcgactgcgggtcgggctgggtatcctcgcc

SEQ ID NO: 605 - DNA, 1967 bp, Pseudomonas aeruginosa
  marker
gttgcaccaggacgtgtggcggacggtcgtgggccacttcgttggggccgtcggcgtgcagccgggcggcggcctcggcctggtcgaggccgtcctggcgaccgcggacgttggtgagggtggtttccaggctgttctgcgcttcgcgggcggcgcgcatggacagtcggtcgttgcggcgctcggtatcgagctgggtattgcgttgggtcgctacgctcatgactcaggtctcctgtcgcgagctgcgcgacggcgacacgagtcggttgccggtcaggtgacaggcaaaggcgtgccgggtcgcgatgttcgcgatcggtgggaagaatgttcggcttgtccgggtgaggcccactgcgcgcggccgctcaggcggcacgcagcaggccgacttggtggttcgtccatggcaggctccttgtgcgaagggttaaaaggcaggagaaagcgtcagccgcgcatcgggcggcgaccgctctcagggttctcttcgacctgcgtctccaggcggcgatactccaggcgaccgccggccgggtcgacacgccaggcgaggctcgcaggatggccgtggccgggaaggatcgcgccgggggactgcgcggcgcgcacgcgcatcttcgccacgaaggcggatacgccgggggataccgaattctcgaagttcatgactcacctgtacccggcgtgccggacacgggtgagaagcagtgggtcagcccaggatgccgctcaaccgaccgacccgttgcgggttccgtcgtgcgttggtttgggtcatcgcaccagccggcatctgctgggccgggcgacgactactgggaatactgtccatggctctcttcgtagggggaaagaaagtgcccggctctgcgggcgggggttttatagacctcttgccagacgaggtcaaccgaaaaagccgtttcgttcaggcttctatggaacatcggaaaattcccgcaggagtccggcgaaaagacaccggccaaaagcaagctcaggcggagatcagtcccgccagccgtcgcgccagcgccggcacttcggaggccgggtcgaggcgcaggcgaaaacgggtctgcaggatgtccagcagttcctcgacgtcgcgcagttggcgctgcagcgtctcgccgttgccggcgcgctggccgaacagcccgtcggccagggtcaggcgcaggtcgccctcggttatggcggccttcaggccctggcggaacacgctgtgcgggtgggtcgaggtgtaccagttgcgcgggatgtaatcgatccacaactgcgggcgcaggtcgaagcggtacagcggcagccagccgctgcgaccgcgcacggcgctttcgtagagaccggcgtgcgggtcgaccaggcgcacgcaatgcacctgtccggcgtccgcctcgtcgcccggcaaaggcagtgctcgcggcggattggccgagccgaagccgacatccaccaggaactcgccctccgccaggtacagacgcagcatcagatgcgattgctgggtcagcggcgcgtcctccgggagcccccagcgtacccgtgccaccagcagttccagctcgtagccgagggccagcagcaggcgggcgaacagcgagttgagttcgaagcaataaccgccgcggctgccctcgacgaccttggcgaaaaccttgtcggcgtcgatctcgatgggacggtcgagcagcacgtcgaggttctcgaaggcgacccggcgcagatgcgcgtcgatcagtcggtcgagactcgccagactcggcggaccgggatcgtcgatgccgatatggtgcaggtaggcatgggtctgctcgggcgtcagcggggtcatggcgggctccaggaaaatggccagctcgattctagacgcattctcggggaataccggaagcgccgtcaggcacattggcccggggtctgcttgactgtgcccatcccaccccgaggagcgccgc

SEQ ID NO: 606 - DNA, 1946 bp, Pseudomonas aeruginosa
  marker
gttcgcttccgccggagccggcgcgaagcaacgcctggccgagctgttcgtcgaaggccttgcggttgcccaggccggtcagcgggtcgcggtaggccatttccagcaattgctgctggtaggcgatctggtcgctgacgtcgcggacgatgccgcggtagccccgtagttcgccctgcaggtcgtggatcagcgaaaccgtggcctcgaagtagccgaggctgccgtcggcgcgctgcagggggatggcgaaggtcttgcctgcgccgctctgcatggcgcgctggaagggttggcgggcacgcgccaggtcgtcttcgccgagcagttcgtagtagggatggccgatcagcgtttcgcgcgtctggccgagcagttggcagagcgcggggttgacggtgaggatcacgccgtcgacgtccatttcgaagtagccgtcgcgcatcgactggaggatcgcccggtcgcgcgcctcgctgtgttccaggcgctcgagcatctggttcatctcgcccgccagttgtcccagctcgtcgttgccgaagtcgctcaggcgtatcgagtgggcgttgcgtccgacttcggcgacctcccggttgagccgttggacacggcgcaggacccacagctccagggccaggtagccgaccaggaaagcgcccagcgcgaccagcagggaggcgccgaggaagaagttgatggccttctcgccctggatgtagagcaggcgtttcttggtgatgtcgaagcgcagctgcggctcgccgctggaactcaggtactgcaccgagacctgctggacatgttcgccgatgaaccgccgtgggctgagcagggcctggttgtgggtactgccgctgcggctgcgcagcggcttccaggtggagtcggtggcgatgttgggcatcggttgcaggtcggcctgcatctgttcgcggaggttggccaggcgttcccggtcgaggaagtagccggcgaggatcgcgcccttcgccggcgcgctaccctggttgttgctgataggcacgctgaccagcagggtcggcaggttgtcgaccagcagcagctcgctcaggctgtggtcggtgcgtccgcgaaagtccagcgcgccgaggcggatggcgcgttgctgcagtgcctcgagcagggcctggtcgctcgccgagggggcgccgaagagcacgcgctggtcgggcgcgggcggggaccactgcttcagttgcaggtgaccccggtcgtcgaggaacaggacgaagtcgaatcccaggtcgtcgagcatctcgtggtcgaggttttcctgttcgaaggtctcgttggggcgctggatgaagtcgtagctggcatcccaccaggcgtaggtgcgaacgatgtccagatggcgcttcaactcgaagtccagccggttgtgcaggacggtggcgccctcttgcaggcgttgctggtcctctcggtcgaaacggctcagcaggatgctttccgacaagagccagataccgccgagactggcggccagcaacggcaggaatagccagagcaggcgtgtgcgtaggggcatgcggtgaggacgggtaatgggcgacagcatgagtctagccgcaggttgagagcataggctgactctatcgtgcgaattgaaattcgacatttcaatgcatcgtcgtggctgggtaacctgcgctgcatattcttccgggagcctggcgtcgtcgggcgcaacccaaccaaattctaggagcctcgacgatgagcgtactggtcaacaagcaagcccccgatttcactgccgccgcggtcctcggcgacggttccatcgtcgatgccttccagctttccagcctgcgcggcaagtacgtcgtactgttcttctggccgctcgacttcactttcgtctgcccctcggaaatcatcgcccacaacaaccgcatggataagttccgcgagctggg

SEQ ID NO: 607 - DNA, 1581 bp, Pseudomonas aeruginosa
  marker
gcttagaggtctgctcatgacgtcagtgtcgaccgacgccgtgtagcggatgtgaagttttggtgacgcttgcgtgacggcgcccctgtcggggcgccgtggatttcagcgttgcagcaggcgtgggttctcctcgccgaagatctgcttgcgcagggccttgaggcgttcgtcgatggcggcgtgacgctgctcctcgtcgtcgacgctggcgagcacctcggcgatcaccttgtccgactcttgcgcgtattcgcgcagttgctcttcctcgccaggcgtcggcgcttgctgctggacggaggcgttgtccttgagcgccatccagatctcgaagtcgagcgcctcgcggcgcctggcatcggcctccacatagggcgtcagacgctggatctcctcgaaggtctggcgcggatcggcgccgaccgccacctcgcgcttgagctgttcgatcagaccttcggcggcctgcttgcgttcgatctcggacatctgcccggcgttgcggccgaactcgccgagttgctgttccaggttgtcgggagcggtggctgtattcatctcgggggctcgggaaggaatggaaggttttgccgccggtgtggcctgcgggggagacgcgaagggcgcgacgggcgccggctccgatgggtaaaacaacaggacggcgccgatggccgtgccgcagagcagcagggccagcaaggtccaggtcagggtaggtctcatgcgatggactcctcgcttcaggtcgctgcgatgtcgagcaatggatcgctcctgctcggcttgccggtctcgacgtgtccggccaggcggcggagatagttggcttccgtattgctggcggtcacgctgaggtcgtaccagccctggctgctgcgtaacagccacacttcactgatcgcctggttcggttcgagttcatagcgacggctgccctcccgggtataggccgggttcggcgtcaccgtcacgctgcacggcaggcggccgagattgcggatgttcaactgcaggttgccgttgcgttgataggtgaccgatacctcgggccgcgccatctgcgcggcgagatgcaggttgccgtggaactcgcggaagaagccgttggggccgtgcacctcgaaggcgtagcggccgttggcgtcgagcaggtcgtcgagttcgtcgttgagggtccggcccagttcctctccgctttcctggaccaccggatagctggtcacggtatagaagcgcggattgccgacttcccgcggctgcacctggaataccgcagcggagtgtccctgcggattgcccggcaggctcatgccgtcgttgcccagggtcaggcgcagcttgccggcggcgatgtcgagggccagcgtggcgtgcaactggtagggcaccgcgagggtagggcgctggcccttttcctggccgggcaggctcttgggctcgtaggaccagtatttgggactgggccggtagaactgctgccagtaggcgtcctccttgcgcgcgtcgctctgcgggacgttggtcaggtcgggggcgacctgggtatcgcctgcgccctggaagtcgaacagcgaa

SEQ ID NO: 608 - DNA, 1562 bp, Pseudomonas aeruginosa
  marker
gtcagcgaactggagcacccggcgctggccagcgccatgccgctgctgtcgcgctgcaactggacgccgttccgccaccgggcattccaccatcggatcgataccaccatcgtctccgggcaactcgcctggcacgcgggacgcctgtccgacgattgccagggactgcccctgcggttttcccgctgaaaagtcttgtccacagcctgaaaactgtggatatccgtaaaaaaaaaaatcgcccacggccctagcgcagggctttcaccgccgcgccaaggaaggcataggtctcctcctcgcgatcgtccatctccggcttcggccaggcgctccagaccaccgccacgatcttctccttgcggttgatgtagaggtactggccgaagatgccctgggcttcgaaggccccgccgtcatgctcgggcagggccttggcgcccaccgggaaggtccaccactggtagccgtagccgagcgcgtattcgccatcgtagagcttgcccggggccaggtgggaagaagcctcgacgcgactggcacgatcgacccaaccttcggggaggatacgttcgccatcgatcaccccgtcctcgaggacgaactggccgaagcggccatagtcgcgcagggtcgcgctcaagccgctgctgccgatctcttgcccggccggcgattccagttgccagaagccgtcgctctccatgcccattcgcgcccagatccgctcggacaggtagtcgctcaccggaatgcgggtcgccgcgtgcagcagctcgctctgcaggtgcgactcgccggtgctgtaggtgaagtgggtaccgctcgggtactgccgcggcaggctcgccagcagccgcaggatgccaccgggacgttcggcgagctgggcgtcgaacatctgccggcggtcggacttcggatcgcgataggtctcgttccagcggaccccggaactcatctgcaggacctgctccaccgtcaccccctggtaggcggagccggccaggctcggcaggtacttgtccacaggctggtcgagagccagcaggccctgctgcacggcggcgcccaccagggtcgaggagatcgacttgaccaccgagaacgaggtccagcgcgtgcgttcgtcgttgcccaggccgtagcgctccagggcgaccttgccatccttgaggaccagcaccccgccaacgcggttgcgccgcatgaaatcgtcgacgccgtattcctcgccgccgatccggtagcgcggcgcgatggccacacccgccggcagcggacggaccttggtccccttgtggataacccgggtcggatagaccttgtccatgttccggtaggtgtccggctggtattccgggatcagttcatagagatcggcggcacggccgatccgcgggttttccacagccgcgtcggcgccggccgagccgcttgccgagacgaacagtgccagcagggccggccggaagactgatatacagctacgcatggacagttttccttatgaccggaagcagctccggcttcgtcgtttttatggatgaaaaaaaaaaaaa

SEQ ID NO: 609 - DNA, 1444 bp, Pseudomonas aeruginosa
  marker
ggcgagcgagcgacattgccgttgccgttcagtgacatgaagcccgtccccgcggccaggctgcgcagttgcgcctacgagatgggtttttctctctatcacgccggtcaatgcttgcgcgtggttctctaggttcgaccgaatcaagagtgtgttttcagcaaaataatgatagtttgttgtaaacacacatgaggaggtcgtcatgagcgctctcatcaaggaacgtcccagcgccgatgccgtcctggccaaggccgtcctggccgcgcgcgagcaattggggctgacgcagctcgaactggccggcatcgtcggcgtcgatcgcagcgccatcagccgctggaagacccagggcctgcgggtggacagcaagaccggcgagctggctctgctgctggtgcgagtctatcgcgcactgtatgccctgttcggcgggcagcaggaggacatgcgccacttcctgcgcactcccaaccatcacctggcgggcgagccgctggcactgatgggacaggtgcagggcctggttcatgtgctggaatacctcgatgcgatccgcggcaaggtctgatgcccggcgcgcctgtacgggaggcctacgcctgtcacggaaaaggctggcagccagaggcgacacgcctggctgaatggagactgcggtgccgctacgctggcatccgacaccacaggaagcgaggggcggaaaggtgagcgagatctggcgacagtgcaagggtgagcggcatgtccgaccgctccaggggcggctggtgcggttggtggagagccaggagcaggtggcgaccctgcaattggtcgacaccctggaagaacaggcgttgctcgaggaactgctcgagtcgagcaagccgccggtgccggcggatgccgagccattgcattacctgttgaagaccccgttccgttatccgcccttgcgctgggggtcgcggtttggccgtcgccacgagccaagcctgttctacgccgcgttgaagctggaaacggccatggccgaaagcgcgtattaccgttgcgtcctgtggagtggcatggcggtgccgccaccgagcgggaggattctgtccgagcacgcttcgttcgaggcgggctggaaggtggagcggggaatccgtctgcaggcgccgcctttctccgatcacgaggctgcgctgaccgacatcgccgactaccgcgctccccaggaactgggaagtgccatgcgcagcgccggggtgcaggcattcgaataccgttcggcgcgttgcccggagcgcggctgcaatgtcgccctgttcacgcccgcggccttcaccgaaaagcgtcctcgcaacctgacgccctggctgtgcgaaaccacggccggttacgtggccttcaagccggcgcatgtgccggggtcgccgaaaatcttctcctgggagctgttcctggtggacgg

SEQ ID NO: 610 - DNA, 1355 bp, Pseudomonas aeruginosa
  marker
cttgctcagccacctcggccgcctgctgcgcggcgagcgcggcagcgtgcatatccagctgctggaaccgatccccagccagggcctggaccgcgccgaactggcccgccaggcccagcaggcggtgcgcctggcgctgttcggcactgccgcccctacgcaaacccggcgcgccgcctagtcgcgcttgggcggcaccgccagcacgtcgcacggcaggtcgccgagggccgcctcggccacgctgccgatcagcgcgcggcggaagccggtcaggccctgggtgccgagcaccgtcaactgcggcgcctggcggcgtacctcggtcatgatcacgttgatcggcaagccttcgccgacgcgcaactggatgtcctcgcggcccagccccaggccggcgacgtagtcgcgcagctcgacgttggccttgagttcctcctggtcgacgtaatgctcgacgcggtcttccttgatccccgaataacgcatcatgcctttggcgaacggctcgaaggcatgcagcgcggtgaggctggcggcgtcgaggaagccgagctggccggccatctgcaccgcgcgcgtcgaggtcggcgagaagtccagcgccagcagcacccggcggtactcctcttccggcgcaccggccgcgcgcagcaccgggatcttcgcattgcgtaccacccgctccagggtggtgccgatgaacaggtcgcgcagcggcgtgtgccggtgcgcgcccatcaccagcaggtcggcgccgatctcctcggccaccgcgttgatcaccaccaccggatcgccgacccgcacgatcgccttggactcgacgccgaggcgctccttcagggcctgtccgttcacttccagcaggttggcgatggccagccgttgcggcgcgatcagcaccggcggctggtcgtcgtcgagcacgttcagcacggtcagttcggcattcctcgccttggccagcgccgcggcgcgcatgaccgccagctcggaacgcgaggacaggtcggtcgccaccaggattcgtttcatcttccacctccattggcagagcgttgaacgtcggccccattgaacgatcgacgcgaccgctgccggttgatgtgcatcaagcggatgcttcggactgaaacaattgataggtgattccgccggccgggccaatggccgctgcgccaaaaaaaaaaaaggctcagcgctggctcagggcgaaagcctggagttgcgggtagaaggcgcggaaatccgcgctcaggtcatcgtagcgctgggccagttcttcccaggagccgtccagcaggtgcggtcgcgacagcctccgcgacataccgcccagcacttcgcgcaag

SEQ ID NO: 611 - DNA, 1335 bp, Pseudomonas aeruginosa
  marker
gacgactgatcgggaaccacgacgaagcgccggcggcctgccccgccggcgcttttttcttgaccgccagaaagcctcaggcgctgcgcggcctgcgccggaccagatcggcgcgcagggccagcaacaggcaaagaccgaccagtaccagcaatgcccagcgcaggccgatctcgtgggccagcaggccgatcagcggcggtcccatcagcagtccgccataccccacggtagagacggcggcgaccccgatcaccggatcgatgcccggctggttgccagcagcgctgatcacgatcggcaccatcaccgacagtcccaggccaaccaccccgaaaccggcgatgctcagcgccggccaggggctgaacagcgccaccagcatgcccagcgtggccagcgaacccaggccgcgcagcaacggcgcatcgtcgatgcgtccgcgcaggcggtcgccgaacagccgccccaccaccatcgccgcggaaaacgccgcgaagcccagcgccgccacccgctcggaagcatccagaacgctgtgcaggaacagcgcgctccagtcagccacgccgccctcggaaacgaacgcgcagagaatcagcaggcccaggccgagcaaggcccgcggcggcaaggtgaagccgccgcccttgcgcgcgcccgccttgctcgggtccggcggaagcaacgcgcgtacgaagaatggcaggctcagcaggccgagtgcggtgagaatgaggaagtgccagaacggcgtcagtccggccagggccgcggcgctcaacgcaccgaccaggcaaccgaggctgtacatgccatgcagcatggacatgcagggcttgccgagcaggcgctcgacatccaccgcctggatgttcatcgccacgtccatcccggcgaagctcacgcccagcacgtagaaggccaacgccagttgccaccagccctggctcaggccgagcagcggaaacaccagcagcatgatcaggcaaccgccgatcactacgctgcggctgccgatgcgctggaccaggaaaccgctcaacgggaacgccgtgagcgcgccgaccccgacgccgagcagggcctggccgagcgcgcgctcgtccagctgggtctgctccttgagcgccgggatgcgtcccatcaggttgccgatgaccagcccggccatggcgaagaaatagatgcaagccaggcgaccctggcgaggattgacttccgacatggaggctcccggtttccttgctggtttctccggacaaaaaagaaaccccgcacaaggcggggctcttcgtcggatgcgcggatcaggcgttggctttggccgccgcg

SEQ ID NO: 612 - DNA, 1314 bp, Pseudomonas aeruginosa
  marker
cctggccagcctggtctgaaggcgcgtccgcgacacaccggtccggcgctgcgccggcaaggaaatcccacccctcggggtgggatttttcatggccgtgattttttccgaaaacccgccctgcgaccggctgacttcaaagtccgaaaccggcattgtatgaccgccaacacaacaataggccgagaaacggccagaggagcgaatccatgcgtatcggcctggtggtcgacgcgacctgcgacctgccgcccgaattcctcgccgcccacggcatccgcgtgatgccgatcgggatccgcctgggcgagcagcggctcatcgatcgacgcgaccccgacaccaccctgagcttttaccgcgaccacctgcccaaggtcggtagcaaggacggcagccagccgctctccgccgccgagttgcaacaatggttcctcgacgaactggtgaccgacttcgactacgtggtctgcctcaccgtcgacagcctgcgcagtccgatcttcgagcacgccacccaggcctccttcggcctgctccagcactaccacgagcgccgccacgcggccggcatcgccggtcccttcaccctgcgcgtactcgacagccactcggtgttcgccggcatcgcctgcctggcggccgagggcacgcgcctgctggcgcagggcagccaccccaacgcgctgcgtacgcgcctcgaacagctcagccagcagacctgcacctacctggtcgccgatgacctgggccacttgcgccggcgcggcttccagaagggtgatcgcagcggtttcgtcgaccgggtcaagggcgcagcgctggggttgggctcgctgctcgacgtcaagccggtgttcagcctggccgatggcgaggacaaaccggtggcgctctcgccgagcttcgagaagtcggcggagaagctgttcggctatgccctggcgcgggtacaggcgggtgagctgctggcaccgcaactgggtctcagctatgccggcgatccgaccgcgctgcgcgacctgccgggcttcgccgcgctggagaacgcctgccgcgagcgcgacatccacttgcacctgggcatgctcagccctaccggcggcatcaatctgggcgccggggccatgagcctgggcttcatcgccacgccgaaagcctttgcctgagagctactcgcggctgcgtggcaaggccccgccatcctctgccggcggccgctcgggcttcgaccgagcgggctggaccagcggactggcgcaggcgtcttccaggtagttctggaagtgctcgacgatactgtcccaaccttgc

SEQ ID NO: 613 - DNA, 1154 bp, Pseudomonas aeruginosa
  marker
aaccagatcctcgccggcaagctggtcggccgggtgctggtcaacctcggctgagggcgttgccggagcccagctccggcaacaggtagcccgcccatagcgattcggcgaactgcggccggaagaagccgaaatggccgatatggcgggcgccgatttcctcgggagcgatgcgccaggcggttttcggcgcttcgcggtagaagcccagcagcgactcgatgctgcgtcgggacatcatttcatcgtcggtgaacgacagcgacacgatgggcgtgcgtacggcggagaaggcgcggcggatggcctcgccatccgcgagggcgtactgcggatgcaggcaccagcgtcgccattgttcgatcaccccgcgcggcaggtcgccgaccatgcccaggcggcgcccgggaaaatagccgagcagcggcgtcagcaggggcgcgacgaggtaccagaacaaccagaccttgttgcgcaaccgcgggctgttttccttccagtagccactgccgctggcgatgctgaagaccctctcgatacgctcgcgcccttcgacgaagggcaggatctggccgcccaggctatggccgatccagtacaggggcttgctcccgctctcggcgagcgcggcggcgagcatggcgctgcagtcatgacgggcccagcccagcacatcgacctcgagaccgcgcagcgagccgttgcgcgattgccccatgcccaggtagtcgaaggtgatggccaggtagccgcgctctgccagccaggcggcgaagggcgcgtagaaccgctgttccacgcccatcgccgggacgatcaggagatagccgcgcggctccccggcaggccggtaccaatggctggccagcggatggccgttgccgttatcgatgaggcgtggttgcggagggttcatgccggtctccgtggtctgttcgcggcttcgagaatagggctggccgccagggcgcctccagccggccgaaagcacggccggggcgccctggcggtcaggcaactggctgacgtacatggtgatctcggcgcggaataccggcttgtcgtcaacataggcgaccaccggcaccaccaggttgccggtggcttgccagtcgatctggctgccgtcggccactgcgcgcacgtcgccagtg

SEQ ID NO: 614 - DNA, 1145 bp, Pseudomonas aeruginosa
  marker
gggatatctccctttgcgatgggttcactgattgggaccgggaggcgacggcggacgttcagagaaagtgacgcaccggcacaaaccccttgaccttgccccaggggcaatccgtagtctgccggtatcccgcagcaggaaccggaaatgctcaccatcggccaactggcgcgaatcttcgagatctccaccaagacgcttcgccactacgatgccatcggcctgttcgtccccgcgcgcaccggtagcgacaacggctaccgctactaccagccggaacagatcgagcagctctcgcgcatactcgcgctgcgccggctggacgttccgctggaagccatcgaccgcctgaaacgcgatggcgcgctggacgacccgcaacgcctgcggcatttcctgcaacgacaccagcacaccctgcgcgaagagatcagcgcccgccagcgcctgctggcggaactcgaccgaaccctggcgacgctcgcccactggaggatccgcaacatgcatgcacgaatcgtcgaacgtcccgccttcagcgtggtgggcatggaatacttcggcagcgcccccggcgacaccatcggccagctctgggaacgcttcatcccgcgcgagcacgagatcgccggcaagcacgatcccgaggtctcctatggcatctgcgcgcagcagcccaacggcgaattccactacgtcgccggcttcgaggtgcaggagggctggccggtgccggagggcatggtgcgcttccaggtgccggcgcagaagtacgcggtgttcacccacaagggcacggcgccgcagatcgccgagagcttccaggcgatctacagccacctgctcgccgaacgcggcctggagcccaaggcgggggtcgacttcgaatactacgaccagcgtttccgcggaccgctggatccgaactcgcaagtcgacctgtatatccccatctactgaatcagcgcttgccggccggcaccttggctggcaagcgcatgcgctgcagcagcgcggtgcactggttgtcgtcgcttttgctcggcgccaccagcgccagcaggctggccgccgggcccaccgtcacgccgagggctatcattcccgcgccgcgcgccaccagcggcccggcgtggaccccggcg

SEQ ID NO: 615 - DNA, 1092 bp, Pseudomonas aeruginosa
  marker
agcgaacaggcgccgaaggcgatgaaaccgcccagcgacaggccgatcagaccggcgtagtcgaggtcgaagctgccggccatgccgagcacggcggcggggaagatcagcatgaacatgtggtcgatgacatgcgcggcgttgatgaagcggataacggttcgaggtcggttcatggcgtgcggcctgaatggtcggtgaggaatgggcgtcatgacccgggcatgataggttgaccgaaaagcgcagacaggacagcgaggtcatcgaaacggacatgctgatcgagcaccgcccggacggcctgctggccgccatctccctcgacttccccgacggccatcacctggggcggcatttccacccgcaggcgcagttcctctacgccgctcgcggcctgatgcgcctggccacccaccacggcgcctgggtgatcccgccgacccgcgcggtatggattccgccccgggtggagcacgagatattcatgtccggcgaggtgcacatgcgcaccctgttcatcgagcaacccgaaacgccgacaccgctaagcgactgttgcgtactggcggtgacgccgctgctgcgggaaatgatcctgcgcgccatccacctcgagagccagccgcgcctggacgacttccgccagcgcctgcaagggctgatcctcagcgagatcgccaacctcgaacggatgccgctgtacctgccgatgccccgcgaccgccgcttgcaggcgatctgccaggcattgctgaaacagccggaactggggctgaccctcgatgactggggcctgcgggtcggcgccagctcgcgcaccctggcgcggctgttcgcccaggaattgcagatgagcttccatgagtggcgccagcaactgcgcctgaccgaagccctgccgcgcctgctggccggcgacagcgtgcaggtggtcgcccgcgacctcggctacggcagtacgcgggccttcagcagcatgttccgccgcctgctcggcgaaaccccgcgcgactacctggggcgactggagcaactggcacgggtcaggggccgcgaggactgatgccccacggcgcaacgccaagcaat

SEQ ID NO: 616 - DNA, 1066 bp, Pseudomonas aeruginosa
  marker
taagtcggccattgcgatatctcccggatatggtgagttaagaaagacagtattggatatatcgcggcggatccgtcgaaaatccatccgtacgctcgctctggccagacgaggcgattccatccattacagaggaagcccgtcatgcacactcattctccaatcccccgtaccgccctggtcaccggcggctcgtcgggcatcggcctggccatcgcccggcgccttcggcaacagggttatcggatcgccctggtggcccgtgattcccagcgcctgcaacgcgctgccgccgagttgggcggtgtgccctggatggccgccgatctttcccgccgcgaagctgtcgaggcggtggccgcctgggttggcgacaccttccaggggctcgacgtgctggtgaacaacgccgggttcacccgaaagatcgccgccaccactccgctggctgaggccgagcgggaatgggatgcgctgctggacggcaacctgaaaagcgcgttcctcatgtcgctggcggtgttgccgcatttcgcggaagagggcgggcggatcatccatatcggatcgatcgctgcgcagaccggtagcggcagtcctggtgcgctgggctatgcggcagccaaggccggcctgcatggcttcggcgtggccctggcgcgggaactcggttcgcgcgggatcacggtgaacagcgtggcgccgggttacatcgccgacacccggttctttcccggcggcctcgatccgcaacgggtcgccgccatcgtcggcgagaccccgctgggcaggaccggccgggtcgaggacatcgccgcggcggtggcctggctggcctcgcccgaggcggggttcgtcaccggaacggtggtgtcggtgaacggtggctggcgggtcggcaactgaagtggaagcggcgggtaacgcctatgggggtactcgtccggctacccgagaacgcaggtgaatagccgtggggcgcctgtcccgcgctggtgcgaggcattggcaatcctgaaatgaaaagagggagccctggctccctcttcgcgcgttcgccgttccg

SEQ ID NO: 617 - DNA, 1064 bp, Pseudomonas aeruginosa
  marker
gctacgcaggtcgtcggcgacctcctcgagccaggccacgatgtgtcgatgtcgagccatgccgtctctcctctggccggattgcgctccggtcttgttggcgggaggcccaggacgcaaggccggccgggcgtggtcacaagctaagcgcggcacgcggcgaaggacaacggaaggcggttccactgggtggaacccaaggcccgcgccgccctccgccggtacgtcagaactgttccggcggcacttcgcggaagttcagcacggcgaacaccggtacctcgggagtgatcgagggaatattggccatctccttcaagggcttgagcttctcttccaggtcgaagtcgagcagcttcagcagcaccggctccagggtcgccacctggaccagcccttcgccctggcgggtgaccagcacgtcggccttcaggcggcgctgctggccgtgcaggtcgagggtgaagtcgagcttctcgacccgcgactggccgacccgcaggtcgtcgaagccggccatgtccaggcggctctccacggtggcctcggggaagcgcgaggtttcgaagaagttgtccttcattcgctcgtcgcgcagggccaggccgctgtccagggtgcccagcggcaccacgatgcgcgcgacgccctgcttgtcgatctggccgctgagacgatcgaagcgctgcacctcggccatcttcgcgcgtttcacggaaacgaagctgatccgcgagtaatccggctccagttgccattccgccgccgacagcagcgggctgaggagcaacaacaggacacacaatacaacaggcattccacctccggcttcgggccggcgccgtccctcgccccgcgccccgacatgcgccgccggtcagtccggcagcctgtccgcctcgggcatgagccggcatccctcgcgcgggcccagccaggcggccgtctgcgtactgccgaggccgcgggcggtcacccggcggcgggcttcgtcgtcgaagaagccgctgatcggcacgtactgttgggtataggcccggcaatagtccgcggagttccccatc

SEQ ID NO: 618 - DNA, 1058 bp, Pseudomonas aeruginosa
  marker
ccgtggacttctgcatgcccaggctctgcgcggcctgggtgaagctgtggtactccaccacgcgggtgaagatcagcgcatcatcaagccccattattgttccctataagcaacaaagagtccgaagtgtagcgcctataacgtccggcggaacactgctagattggccgaattttgccgacggaacactccacccatgcccgcccaactcaaacgtcgcctgaccgtcttcctggtggccgtcggcctgatcgccctggccttcttcctgcactggtggttcatcggccgccacgtggaaagcaccgacaacgcctacgtccagggcgagatcacgcgggtggccagccagttgggcgcgcgggtcgaggaagtcctggtgcgcgacaaccagcacgtggacaaggggcagctactggtacgcctggaagacgccgacttcaagctcgccgtcgagcgcgcccaggccgcgctggccacccgcgaggcggaactggcccaggcgcgcagcaagctggtgcagcagggcagcctgatcgccgccagcgccgccgacgtcaacgccagccaggcaaccctcggtcgcgcacagatcgacctgaaccgcgccgaagccctgcgcaagcccggctacgtttccgaggaacgggtcaccaccctcaccgccgacaaccatgtggctcgctcgcaactggccaaggcccgcgccgacctcgaggcacaacgcgtccagcgcgacaccctgggcgccgagatcaagcgcctggaagcgcagatcgccagcgcccgcaccgaactggcgcaagccgaaatcaacctgtcacgcaccctgatccattcgccgatcagcggcctggtcggccagcgcagcgcacgcaacggccagtacgtgcaggtcggcacccatttgctgtcgctggtgccggacgaagacatctgggtccaggccaacttcaaggagacccaggtcggccgcatgcgcgacgggcagaaggcgcgcctgaccttcgacgccttccccgacacgcctatcgacggccgcatcgatagcctgttcg

SEQ ID NO: 619 - DNA, 1057 bp, Pseudomonas aeruginosa
  marker
  misc_feature (643)..(695): n = a or g or c or t
gacgatgatcggctggatgccgtagcggctcgccgagaaggccaccgactggccgtggttgccgcgggtcgcgctgatcacggcggccggccgctcgccctggtgcgccaggtggtggaaatacaccaggccgccgcgcagtttgaaggcccccaccggcaggtggttctcgtgcttcatccacacttcgcaacccagtgcctcgcatagcagcggccagcgtatctgcggcgtcggcggcaggctctggtggacgatggcggcggcctgttggagggcggcgagagaaaaaggcatgcgtggtttccccgtgctggtggtcggaccagcctagggagcgcacggcagcttgaacaggcacacgtagccagggtttcgccgggggactgtaccgttgcgcggattcgccgtctcgcggcgggtgcctggcggcgaaaacgactgccgcccaggagcgggcggcagtcgagggcgttacagcagggtccaggcgtcctgccaggccatgcccttgcccggggcgtagtagaggtcccagcccttgcaccagccggagttcgggtagggcttgcactggtagcgcttgccatcggcaccgcgcactacggtcccggcgtcgtattgctgcaggccttgcggatannnnnnnnnnnnnnnnnnnnnnnnnnnnnnnnnnnnnnnnnnnnnnnnnnnnngcagttcgatgtcgacctggaagcggtagccggcctggcgcacgtagacctggttgtcctgcgagctggccaccgggctgaccgccccgtaggcatccagcacgccgatgttgaccagggtggagtcctggttgaccttctgcgccagcgccagcggccattgcttggcaccgttggcgccctgggccagggtcaggctgtgacgctgggcgtcgcggccctgggcatcgaacagacgcagggtgacggtagcaccggctggcaggtcctgctgcgcgcgcaggttgcccagcgcttgccaggggttggcgacggcgccgctgaagctcacgtcgatgcaggcgtagaaggcttccgggctg

SEQ ID NO: 620 - DNA, 1036 bp, Pseudomonas aeruginosa
  marker
tacgactggaccgcctgccgtcggcgcagcggcgggatacccggctggtgttcgacgaccaggcccaggatgtgctccaccagggccttccggcggggctgacgccatccgagtaccgcctcctggcgacgctccgcgaacacgctggcgaggcgctgagcaagccgttcctctaccggagcgtgctgcaccgcagctacacgcgcctcgaccgcggtctcgacgtgcacgtctgcaacctgcggcgcaagctcgccgcggtcgccgtccgtcacctgcagatccaggcggtacgcggccagggctacctgctggtggagacggaacacccctgatgcgcaggcacccgctgttatggaaactggcgctgctgcaggtcggcttctgcctgctgctgacctggctgatctacacctggggcctgtcggtggagcgcagcacctacttcctcgccccggccgaccgcagctacctggcggactacgcgcggcaggcggaggatgcctggcgcagcgagggcgccgcgggcgccgaacgcttccgcaaggaactgtcggcgaaggaagatacctgggtggcgctggtcggaccgcacctggaaagcctcggcagcacgccgctaagcgccgaggagtcgagccacctgaccttcatgcgcaagctcgactggccgatgagccggcgcctgcaggacgaactgccgtacgtcagcatcgagttccccggacatcccgagcagggccggctggtaatccagttaccggagcgcctgctgcccggcgggctgaccccctggacccacctggtcacccacggcatagtcccgaccctgctggccgccctgctcggcctgctgctctatcgccacctggtggtgccgctgaaccgcttgcgcgatcgcgccgacgccctgcgcgccgacgaactggaaagcactcccctcgccgcaccgctggcggcccgccgcgacgaactgggcgagctggcccaggccctggagcacatggccgagcgcctgcgcctgagtctcgcccag

SEQ ID NO: 621 - DNA, 1008 bp, Pseudomonas aeruginosa
  marker
gacggcatgcggcgcttgaaggtggcggtgacctgctcggtcaggcggcgcacggtgtcatggatacgcgacgaggcggcggcggtgccgccttccacggcgaggaacgccttggtgatggccacggtgatcttgtcatcggtgtaggggactacggtgccgttgcgcttgatcacgcgcagctggcccggcgcggtggcggccagatcctgcgacgaatcggcggcctgcggcgcgctggcctgcgggttctcgcgtgtggtgtcggtatgcatgggtgggtatctccacgttctcgtaatggttttgctagcgggcgccggggcgcccattcccttgaatcgataaagagccgggcagccggcctcgcggcggctgcttcattcgaatgctgagggtggggactgtgagtgcctccctggccctggcgggttcgtggcgttttgccgtcgaacacaatacctagtggtgttgactgtctgtttacagcgtccgttgcaacacccgtaccgcttttccaacgtcaatgaagggctccttgcggtgagcgccgtcgatgctttcagtacgtctggaaaatgcttttttgcggagccgccggagccatcagagtggtccgtgcgcggttggttccgttgtagccgttcgtgcgctcgaaacccaagatatagggggtggcgacgatggggatacaagataatgcgctaatggggtgtttgcaaggtgacagtctgggggaaacctgtggataaagtgtgggtcttctgtgcgtgagtcctaggaagcgtccgtaggccgcggcagcgctggagaatgccattcgtcgccctcggaaagcaccggcgcagacctactccccaacctttcggggcgcgcaccctacccacaatatgtagtgtttgcaagatgttcctcgcgtgctgccgcgcggcccccgtattggctacaatgcgggccgctctgaagggggccgcgcggcggctccgggaccgcgatacgaaggaggct

SEQ ID NO: 622 - DNA, 995 bp, Pseudomonas aeruginosa
  marker
ttcaagtggtcgatcaagttcgtgcgccgttccggttcgcagttcacctgagggcgcgcgtcccatgagtgcgaaaatggacgagcaggcgcttctggcgttgctccgcgagctggccatcgacagccagcgggtcgagcatcccgcgatcgcctccatcgaggaatattacgcgcagggcatcgaattgcccgaccagggcatcaagaacctgttcctgcgcaaccgcaagggtactcgccactacctggtgctgctcgacgagcgcaaggaggccgacctgccgggcatcgctgaacagatcggcgaaagccgcctgtcgttcgcctcggtcgagcgcctgcgcgaatacctcggcgtcgaactgggctgcgtgacgcctttcgcgctggtcaacgatccgcagcacagggtcgaggtgttgctcgacgatgccatccgccaggaccagttgctcggtttccacccgttggtgaataccgccaccgagtgcatccgctacgcagacctgctggctttcctcgcccacacggggcatgaaccgcgcctgatccgggcgtaggtcgcagcttcgcgcctgccggcaaaaagccaggccaggtcatgccggcgccggtttcactcgaagaagttgtgccagcagtcgctcaacgggccgacctcgaaggtcttgcaccagggttgggcttccagccacagacgggcgctttcccggtccgcctcgtccaggctgccgacccgcgccaggcacaggtagccgctgatctccgcctgttccggcgagccgccaccgccgaacacccagccctgggcctcgacgaagtcgatcagatggtccagcgcatcgtcgtgggagagggcgttgcggtcgtaggtcagttcgaagctgaagccgaactcctggaactcgcccaggcgcagtttcttgcgcaggcggcgcttgcgcggcttttccatctgctcgggagtgaggaatttcatcgtcgccttcctgg

SEQ ID NO: 623 - DNA, 982 bp, Pseudomonas aeruginosa
  marker
ctgatacggcgttgagccatcggcgcccggccggctcgcgctgtccgggcgccctcttcctcaggtgcccaccgcggcgctgcgcgccggacgcggaaacaccagcgccgcggcgaaggtcagcgcggcgaagcccgccagtaccaggtacaaccccagcagcccctgccgtggctccaggtaggcgatcatcgggatcgccgccgcgctggcgccgaacgacaggaaatagcgcagggcgaagacccgcgcctgccactgcggcgcgacgaagtgggcgaccatcgcatcgttcaccgtcacctggccgaacaccgcgaacatgaacagcgcgccgaacagcaccactgcgctgccgtggccgtaggccagggccagcagcagcggcacctggcagaaggtgaggaagacgaacggcaacttcaggttcaggcgatcgatcaggcggcccatgatcagttgcgccaccgcgccgaaggcataggccaggctgaccaccacgccgagggtctgcggcgacgccagcaagtcgctcaggcgctcctggaacagcttcgggtaggtcacggtgctggcgttgaacaccaccccgccggtggcggtgaccagcgccagcacgccgaacacccggcgcatcgacaggccctcgctgtcctcgccacgcgccgcggccttggccgacaggtgcggcgatggctcctcgcgcacgcagaagaaaaagccgatgccgagcaggatggccaccccgccgggcaggatgaacgccgcacgccaaccgaagtgcgcggtgagaaagccggtaagcagcgcggcgaaggcgaccccgaggttaccccacatgccgttgatgccgatctcgcggccgcggttctccgcgtgtgccaccagcatcgcggtgccgaccgggtggtagatcgcggcgaataccccgatcagggtcagcccggtcaccagcatcggtacgctgccggccagcccggtg

SEQ ID NO: 624 - DNA, 965 bp, Pseudomonas aeruginosa
  marker
ccgcacggtgtagaatctggcgattttttgaccaaacgagaacccgcaggaatgatgtcgtccttctttcgcctgctgtccgtcctggcggcggcgctgctggtcagcgcctgccagggcaatgcgtcgtcgcaaccgacgccggtggtcgcgccccaggcgcagcccgccgatccctatgccgaactgcagcaaaccctggccgccggcaagctcgaacaggccgagcaacaatggctggccctgcgcagcgcagccgccggcgacgagcgcgtcgaagcgttccgccgccagttggccgaggcctacatgcagcgcggggaaaccgcgctgcgtcaaggagacctcaacaccgccaccagcgccctcggccatgcccgcggactgatgcccaaagcgccggcgctgaccgccgggctggacggtgcgatcaaccgcgccaaggtcgatcccgcccgcgccgagcaggcccgacgcatgcagcaggcggcccagcagcagatgcagcagatcatccagacgccgcccggcggcgagctgaagccgctgcccggcgctccccacctgatcgatccgcaagcggccagcagcgccgtgcccctgccgatgctcgacggcaccggccagggcggcctcggtgcggtgctcgacgcggtggccgcggatgtcgtcgcctaccgttgcagggtgcatatcgaagtgcgccgggacagcgactatccgctggtttccgaccagctcctggcgcgggtgaagaagctctcacccgatttcgacctgcatctcagccatgtcgtacaggccgacaagccaacccgattgatacttaccccccggaattgagaccggtcctgccccggccgcagcagaaagcgcttgtcgggagcgcaccagacgcttattccatttcaatgatttttcatcaccaataaatattaataatgcataagaaaaaaaaaaaaaaa

SEQ ID NO: 625 - DNA, 931 bp, Pseudomonas aeruginosa
  marker
agggcatgaaaaaccggacctgcttccaatcgggaaacggcctcgctggccgtcgggaggaggggtgcgcataatgcccgcaatttcacgcagaaggaatcgcttgcatgcagtacgacggtctggcctgggcattcgcgttactggccttgctggccgccctggtcgcggggcgcatcctcttcgaacgcacctggttcctcggctggctgcgcggcacctgcggcttggccttcgtcgccgtggcggcgctgctgctggtgctcgcctgggacctgcgcagctattcgctgctcaagcccgagcagccgatggccaccctgagcttccaggccgaagggccgcagcgctaccgggtgctgatccaggagggcgccaacgagcgcagcgtggtgctggacggcgaactctggcaactggacgcgcggattttccgctggaaggggctggccgcgttgatcggtctggcgccgggctatcgcctcgacgcgctcagcggccgcttcctggccctcgagcagcagtcccggggccgccgcctgggcttgtcgcagagtccgctgggggtcgatctctggcgctggctgcgggccggcgagcacgacctgttcctgttcgagccgctggcggggcgggtgactttcctgccgatggcggacaaggcggtgttcgcggtgaactacggcgtcgccgggctgcttgccgagccgatgaacctggcggccgaggaggcgctcagggactggcgctaggaaccatgcgaaaagccggggcggcggcgagcgcctgggcggtttcgcgaaagcgttcgatgagttccgacggcgtgcggtaggccagcgccagccgatagggaattcgcgcccgccgcccttgcaggggacgaaaggtgacccccggcgggcgcaacggttgtagcaacgaaggcact

SEQ ID NO: 626 - DNA, 897 bp, Pseudomonas aeruginosa
  marker
cctggcagtcgtagcgtcggcggccgagctgcaggcagccgctgatcggcaggccgagctggcggctgcaggcatggaaggtgtgttcgcccatcggcaccaccaggttcaccgactccaggtgcgacggtcgtcgcacttccagcgccagctccagcggcaggccaccgaggtccggggcctggccggtgacgcgcaggcgcccgggctgttcgtcgaagcgcaattgcaggcggggatgctcgaaggcatggctggcctgcggctcgtcgggcaactggcagccgaggccgaagaagcggatctgcgtgtgcgctaccgcctggccgctgtccaggtcgaggaaataggcggcgccgtaggtcaggtagtcgaggtcggcgatggtcagcgagagcatccagccggggctgacgatgcaccagtggttccagcgcttgcgccggccgaagtggccggggatgtggcagagcacccgcggccgggcggaccagccgaccgcccggggatcgagccggccgtggccgtcgcagaggttgcgcaggggcgggggcgatacggcgagggtatcggcggcggttccgttcatctaacacatccatgtgacaggctgacgcaagcatgccggctgcggaaggaaggcggcaagtacccactacagaactgatagtagacggcatggagcaggcgggcgccggataggattctcccgatattcggcgccgcgcttgagcggatttcgaacttaggcgcagaatgtcgggtcccacggacacatctacccaacctcaaggattttccatgacccgtcttcgcctcatcggcagcgccgtgctgctcagcctcagctaaaaaaccatggccatggccgattccgccagccaggccgagcaattc

SEQ ID NO: 627 - DNA, 814 bp, Pseudomonas aeruginosa
  marker
gactctcttgccaagcggaagttaaaacggaaattcaggggcgcgatgttatcaggcgggccgcctccggctccagtaaacgaccggtgtcggccggcaggcggctgatcaggaaatcgaggaaggccttgaccttcatcgcctggaaacgccgcgaaggatagaccgcatacagttcgccgaccggcaacggcacgtccgccagcaaacgcaccagacgcccgctgtgcacgctctccgcacagatcagcgccggtagcgcggcaatgccggcaccggcgaccaccgcctcgcgggcgaaggtgatgttgttgcaggacagcacccgctggcagggcaggctgtctccggaaagcggccagtagcgctgggagtcggtggacagaaggaccgcgcgatgcccggcaagctcggccaccgatgtcggcgtgccgtgcgccgccaggtagtcggggctggcgcagagccagcggctggtagagagcaggcgacgggccaccagggtggaatcctccggctggccgaccatgatcacgatgtcgacgccctcctgcagcggatcgacgctgcgcgaggccagctcgacctcggcggtgatctgcgggtactggcgcatgaagtcgcccagcaggctggcgaggaacatctggccgaactctatcggcgaggtgatccgcagcaatcccgacggcgcctgttgcaactgcatgaccgcctgctcggcctcggcgaaatcgtgcatgatctgccggcagcgctcgtagtaggcctgccctacttcggtcaggcgcaacttgcgggtagtgcgattgag

SEQ ID NO: 628 - DNA, 810 bp, Pseudomonas aeruginosa
  marker
ttcgctctgatgagaagacagccctgagtgctgcgtgcaaggaaggccccgcttcggcggggcttttctttgtccgttcggaaaaaaggccgcgggcagtgggtcgtccggttacgcatccgccgacggcgtacatcggggccgagcggcgtgcacggcagaacacgacttaaggacggcggactgcgaatagagcaattgctctagccggcctagaatccagacgcttcatccttcccacgacaacacaatagaaggagcgtcatccatgtttctcagccctagcgcgatctgcctgctcggcctgatcgcctggaccctgttgctggtcttcctgctggtcagccagcgcggcctgctggtactcggcgggcggatggcggtgaacgccttcgccgccgatggcagcaacacgcctggcggtttcggccagcggctggtgcgagtccatgccaactgcgtggagaacctgccgctgctggccggcgcgctgctctacgcgatcgccagcgggcagagcagcctgaccgacccgttggcgccactggtgctcggcgcccggctgttccagtcgctgatgcacctggtcagcacctccgcgctgttcgtctggctgcgttttgccggcttcttcgtgcagttgctggtgctcgcctggtggctgctgctcctcgcggggctggcctagcggcgccggctcagtcgccggcggccagttgctcggcgaatacctcgcggtcgacgttcgctccgctgaggatcaggcctaccttcagccccttcaggcgctcgcgctcctgccaggcggcg

SEQ ID NO: 629 - DNA, 805 bp, Pseudomonas aeruginosa
  marker
cacgggcaccagggggtatctctaggaatggggggtcgcgaaaacgcggggcgcggaatatagcacaaaaaatgagcaattccgacgttttcactgggtattgcctgtcgtcggccggcttcgaaaaaaatgccatcatttagccatcttgtttctatactccattcatcgtcatctcacccggcctctaaggcaggacccccgggagagtcatcgtgcgccatcctcttgccctgctcgcggtcatcttcctgctactggccagcgccgtttcgcgcgccgcgccggagtttccggcgacctccggccagcggcgcctggttgaacggctcgctggacctgctcgaagaccccgatggcaacctggcggtggaggacctcgaacaagcggagcaggccggccgcttcgtcgccgccgccggccgcaccagcgtcggcctcagccgcagcgcctggtggctgcgcctcgacctgccgagacgcgaggcggtatccggcggctggtggctggaagtcgccagcgccagcctgcacgacctgcgcctgtacctccccgacgagcgcggcgggttccgtgaacatcgcagcggcgaagcggtgcccttcgccgagggccgcgaccacgcctatcgtcatccgctgttccggatccctcccggcgatgggccgttgcgcgtctacctgcgcagctacgatcccggcggcaacgcctttccgctgaggctctggagccacgacgaactgctggaataccgcagccagggcaacctgctgttcggcatggcctacgggctgatcctcgccc

SEQ ID NO: 630 - DNA, 804 bp, Pseudomonas aeruginosa
  marker
gcggcgcggaaggcgacggcagcggccggccgatggtcagcccgatccgtcggctcgatccggcgcgggtagccaccccggtgctgcgcgccaacgccgaagagctggctgcgcatgcggcgcggctggcggtgatcgagaagtcggcaggtggtccgtcactctgggcgcaactggaggcgccggtcggcgaatagcctgcccatgcaccacgggcgccgcgttcagcgtgtcgcccggtccaccagcaaggtgtcgcagaactgctcgaaacggcggatcctgccgtcctctaccgtccatacgtgtgccacacgtgcttcgaacgacttgccgctgcgacggtgggtcgctgcatatcgaccgacggcgatcacgctgtcgccgccgtcgatcaggcgctcgatctcgaccctgaagccctcccagtcccgttgcaaggcctggaacacaccggcgccgatggcggccgcgccgacataggtgccggccagcgggaaaccggccatttccgtccattcggtgcgttcgtccatgtccgccagcattccggcgaggtccccacggctagaggccgcatagtgatcgctgacgatccgataagcgctgcgcatcgttgtcgctccgtagcagggcagagaggtccatgctcctcgctggcgggagcggaggcaagcgcggcgcgccgacttgtgttgccgcgaccttttcttacaagggcaagccgccgggggttacgcgcgtgccggcaagtctctaccctgagccgaccggcggggttcgcccgcctgctgctcgggatca

SEQ ID NO: 631 - DNA, 754 bp, Pseudomonas aeruginosa
  marker
actcaagggagccccgcggccgatgccgggcctgcgggtgaagccggtcaccgagtgatcgatggggcgccggcgcgcagaggagaggggagcgctcctttgcgtgtcccggcggcccacaagactttttctaggggcgcctgtcgttgacgcggcaggtgccgaattcctacagtggcagcgccattttttctcgttagagggatttccatgaaaaaagcgctctggctgcttctggctgccgttcccgtggtcctggtcgcctgcggcggcagcgacgacgacaagcagaccgcccaggtcgattacctggccctgccgggggatgccaagctggatacccgcagcgtcgactacaagtgcgagaacggtcgcaagttcaccgtgcagtacctgaacaagggcgacaacagcctcgccgtggtgccggtcagcgacaactcgacgctggtcttcagcaatgtgatttccgcctccggcgccaagtacgccgccggccagtacatctggtggaccaagggcgaggaagccaccctctacggcgactggaagggcggcgagcccaccgacggggtcgcctgcaaggagcgttgagttcgacctggcgccttagccgaaatgaaggaacccggccgcggccgggtttcttttggcctgcttttccgctcggcaaaggggttatgctggcagacccgttggtccaccgtgccgccccatgctgatcatctccaatgccgtccacctgcccgaccat

SEQ ID NO: 632 - DNA, 751 bp, Pseudomonas aeruginosa
  marker
cggccaggtcgcggtggccttttccctgtcggccatcgtcggcgccttcagttgcgcgctggtcaccggcctggtgttcggcttcatgccggcgcgcaaggccgcccagctggacccggtggccgccctggccagccaatgacggacatgtccatgaagaatctctccctgatttccgcctgcctgctgctcggcgcctgcggcagcacgccggcgcccctcgacagcggcctggccgcgccccctcagtggcgctacctggcggccgggcgcagcgatgccagcgacatccgccagtggtggaaggccttcggcgcgccggaactggacagcctgctgcaacgcgccctgctgaacagccaggacctcggcgcggcggtggcccgcgtgcgccaggcccaggcctcggcggtgatcgccggcgcgccgttgctgccggagctgaatgcgacgctcggcgccagccggcagaaactcctgcgcgactcgggctacagcggtaccgacgcgacctccgacaacgatgccgtcgactccttctccgccggcctcagcgccagctacgaagtggacttctggggcggtcgccgggctgcctaccgcagtgccctggaaagcctcaaggccagcgagtacgaccgcgccacggtagagctgaccctgctctccggcgtcgccaacagctacctgcaggtattggcgctgcgcgaacagcagcgcatcgccaggctcaacctggacaacgccgagc

SEQ ID NO: 633 - DNA, 735 bp, Pseudomonas aeruginosa
  marker
caccgtgccggccgacgacgtcgaggatccgcgccgcaccattccccgtgcgaccctgttcggcacgctggccgcggcggccctctacatcctctcgatcactgcggtgcagggcctgatgccgccggaggtgctggcccgctccacctcgccgttcgccgacgcggcgcggatcctgatgggcgactggggctactacctggtggctgccggggcggtcatcgcctgcctgggcgcgctcaatggctgggtcctgttgcagggccagatcccggtggctccggcgcgcgacgggctgttcccggagtcgctcggccagctcaacaagaacggcgcgccggcccacggcctgctggcctcggggctgctggtgacggcgctggtgatggtcgacgggcatggcgacctggtcgatgtgttcaacgtgatcatcctgctcggcaccatgaccggggtggtcccctacgcgttctgcaccgccgcgctgttgcaactgctggcggtgcgaccggacgagttctcgccgcgttcacgccggcaattgctggtgatcggctcgctgggcttcgcctactcgctatgggcgctgtatggcaccggccagcaggcgatcttctggggcttcctggtgctgatggccggtatcccgatgtacacctggcggcaatggcgcaaccaggtcaacggagtgccgacgctcaaagccaatgactgaccgcccaccagcccaggccg

SEQ ID NO: 634 - DNA, 734 bp, Pseudomonas aeruginosa
  marker
gcaggaggatctgcaggatgctgttgacgaacagttcggtgttgctcatccagtgcaggaagagttccgggtgggtgcggccgagcacttcgttggtgtcgtagatgacgaagcgcggggtggccttgtccagctcgggaccgattcccaggtggctgagggccagcaacaccaggatcgacagcagcagggagaacaggtgcagcggatagagattggacagtcgcttggtccagaagctgcgggcgctttcgcgcaaccggccgctgcgtgcgtagacatgggccaggaggaagccggaaagcacgaagaaggtactggtggcgaagaaccccaggctggtcagttcgtcgagaccgggaaacttctgctctttcggataggtatgcagggtgtggtacaccaccacgtacaggccgagcaggaagcgcaaccattccagtccgatgaaacgttccttggagtcgggcgttgccacgcatctctcctttgtcattgtaatgggcggtccggggtagacccgcaagctccccggcaagtttcaccgggccggccagcggctacgaacggccagctccctagcgccggcggtcgaggaaattcaccactacccggtccagccaaccccacaggcgctggtgcaggcgcatccacaggggtcgcgcgcgccacatcgccagggtcacctcgcggctgtcggcgaagtccgccagcaggctcgccgccgcctcatt

SEQ ID NO: 635 - DNA, 727 bp, Pseudomonas aeruginosa
  marker
cagtgcctgggtgccgccggcggcgacggcggccttgcaggcggccgacttgggattctccggaccttcgaggaagcagccgtagacccgactgggcggcgtttccatcgagccgtgggcatgggctgcctggggcaggaacagggcgagggtgagtggcaggagtgccagggtggctgagtagtgtttcatgacaagtccttttttccagaaccggattcatttcgaagcgggctgatcctagccctcggtgccggtttgaggtccctaccaaatgtgacgggccggtcagattcgctacccattcctgatggatgtcgcggaatgcaaagcggtcggcacccgcactgtgagccggtagaggcaggcaaagggccgccatgggggcggggaagggaagccggcgggaaggtggcggacctgtcagaacgatcagtgtccgcgcccggccgcagccgggcgggaagggaactagacctggctgccgagctgttcggcgcgacgcagccagccctggcgctgttcctcgctggaactgcgcatcggcgcgaactcttccaggcggcgggtggcgatgccacaggcgccgagcacgctgcgcaccatctgccggtgcgccggcgggcccttgaggaagcgcagccgcgacagcggctggtcgtggcagaccagcaggtcggcgctgcgcccgcccagcagttgctcccagtccttgtcctgggtgccg

SEQ ID NO: 636 - DNA, 701 bp, Pseudomonas aeruginosa
  marker
aggggtcactccttgttcgtgttggagcccactatgcccaaggccggctgacgttaaaaagaataaattcagattttcttataacaaaaaatagaatacccaacccttcgcctggaaatccgtctcctttcgtccgccggcctgccgcccggccaaacccccgcctacactgaaaacacctaaaatggcccgctatccaggagtcgccgtcatgttggggaaacgttccaccgatcccaccccggccacccgctttcgcagcgatcgcataagttcggtgaatgggcagtacttcttctccacccgcgaagggaccctggaaggtccctatttcacccgtttcgacgcggagcgggaaatcgacgcgtatatccgcaggatgcgccaatcggcggaaatccacgcgccgggttcccgctgaaacgatacaggcgctgaatttatttcccggcggctgaaacgttcaagaaagggaaggcaggtattctcggcggaacgccgaggcaaatgtcaccgcatgtgaacgcactcacatcgggggtgagttccagtatcattcacccggtgaatacctgccatgtcgtgcgtatccacgcttctccacgttttctagcggtaaatccatgaaaaaaatcttattgatgcttttgtgcgtcagcgtgctgggttgctccaaaaacagcgtcgaatcggaaaaaccg

SEQ ID NO: 637 - DNA, 700 bp, Pseudomonas aeruginosa
  marker
aaacttcggctgggaatacatcttctatatcaacgtgccgccgggcctgttgatgatcgccgggctgctctacggcctggagaaaaaggcgccgcattgggaactgctgaagagtaccgactacgccggcatcgtcaccctcggcatcggcctgggctgcctgcaggttttcctcgaggaaggtcaccgcaaggactggctggagtcgcaactgatcgtcagcctcggcagcgtcgccctgttcagcctggtcctgttcgtcatcctgcaactgtcgcggccgaacccgctgatcgacctgggcatcctgcgcaaccgcaacttcggcctcgcgagcatttccagcatcggtctgggcatgggcctgtacggctcgatctacgtactgccgctgtacctggcacaaatccagggctacaacgccatgcagatcggcgaggtgatcatgtggatgggcattccccagctgttcctgatcccgctggtcccgaagttgatgaagctggtctcgccgcgcctgctctgcgccgccggcttcggcctgttcggccttgccagcttcttctccggggtgctcaacccggacttcgccggaccgcagttcaaccagatccagctactgcgcgccctcggccagccgatgatcatggtgaccatttcgctgatcgccaccgcctacctgcagccacaggatgccggc

SEQ ID NO: 638 - DNA, 697 bp, Pseudomonas aeruginosa
  marker
ctggatatgtcgttgaagacccataatggcatttcgctatgatttgcagtccagtatgacgatgccggcgctcggggaacaagctcagcggcagcgttcggactcccgcgaggccagttcgcgacgaatggcgtccagctcggcatcgctcagataaaccggcccgccgccggcgtcctgccgatagaagcggccgccgcgttcgagctgggacaactgttgccgcaagcgcccgcattcctcggccagcgcagcctggcgctggccggcacgttcggcggcggcggtgcgttcctcgcgacgagcatcgaaatactcctgggtgcgctgctcgcgctggcgggtcgcggcgtcacgttccaccacctgcggcctgacttcgacgcgttgcgcgccggccggtggcgtggcggagaagtgtaccttgccctgggcatcggtccagcgatagatgtccgcctgcgccagcacgggcatcagggcgacacagaaccacagggcacgcatgcgaacctcctccgtgaaatccagggcgaagcttaccggatagaccggtgtcccatgcgaccgacggtcagcctgaacgcccgtccaatccctcccggccgcctacaggcgggtcggcacggcgctggccgaggccggcgtctcgctcagccggcccagctggcgcaacgtctccagccgcgccttggca

SEQ ID NO: 639 - DNA, 681 bp, Pseudomonas aeruginosa
  marker
gatcaactgagcgcggcgggcccgacatggaactgttgaacgccaccccgctggccgccgcctacaaccaggggctcgacgccgaaggccgggagtcgctggtggtgatcgccaagggcagtttcgacctgccgctggacggtcgcgaggcgcgcctgctggacgagcagcagacgctgctgatggtcgatgaattctatggcgagccggggttttccgcgccgcgccgggagtgcgagttcgttcccttcaagccgttctgcgatgtgctggtgctgggcagcgcccaggcgcccggcgggcggccggtacagcagttgaccgcgggcatccgcgtcggccgggtgagcaaggcgctgacggtgcatgggccgcgccagtgggaaccgggattgctcggtgccggcgcgggcgtcgcgcagccgttccagagccaggacatttcctacgccagtgccttcggcggcagccatgcctcgccggacaaccccggtttcatggattgctacatggccaatccggccggatgtggctggtttccgcgcagcgccgacaccgccgagatcgtcggcacgccgatgccggccacggaaaagctcggcgagccggtggacagcccccacggccgcttcacgccgatggcgctcggcccgctcggccgccactggcaggcccgggtcg

SEQ ID NO: 640 - DNA, 664 bp, Pseudomonas aeruginosa
  marker
gacagaccggcgaggccggcctgagagcgcgctccgttcgagcctgacaggcctaggcctgctgcagcgcccctcgaacggaaggcgggagcgacccgaaagggccgcctgagcgggcgattatagcggcgccacatgaaactcccaagtcacccctgatacgccgctcgtcgccgtgcgtcgcgccctcgggctgcggcgatgcaccgcagcgcagaagcgcggggaatttgcgggtcaggatgctagagtgcgcggtcatgagaatcgctcccatctcccgctcgccgctgctgcagtggctgagcttcgccctctgtgcctgcgtgctggtcaacgcgctggcttgcggcgtcctgcacctgcaggcgctgggagtgggcagcgacaaagggcagaaggccagcgtcgggctgttctgcgtcgccggtgccagccaatggctatccctggatcccgacgacgggtccgccggcgatccggcaccggtcaatccccagttgccgatgagctgcccgatgtgcagcgccctggtgctgttcgtcgcgctcggggtgatctggtcctggcgcttgcaacggcgacgccaggcgcgtttccgcccgcccgccacgcgcgagccggtgccgccccggtacgtctggccgccggccaacccgcgcgc

SEQ ID NO: 641 - DNA, 664 bp, Pseudomonas aeruginosa
  marker
gcatcaggacggaccgtccgggcgctgctataccgttgaatgcataaaggaatgaagccgacaggctaaggggtgtcgatggcaggggggagagaaggccggcaagcgcggcatggggttctggacctgcagcgcgctggtgatcggcaacatggtcggttcgggagtcttcctgcttccctccagcctggcggcgttcggcgggctcagcctgttcggctggctggtgtcgagcaccggcgcggtgctgctggcgctgaccttcgcccgcctggcgcgggtcaaccccggcgccggcggcccctacgcctatacccgcgacggtttcggcagcttcgccggctacctgtgcgcctggacctactggaaagccgcctggatcggcaacgcggcgatcgccgtgaccctggtcggctacctgcgggtattcatcccggcgctggcggatccgctgctgatggtcagcgtggccatcgccgcgatctggctgtgcaccctgatcaacctgcgaggcatcggcaccttcagcgtggtgcagaacctgctgaccatcctcaagctgctgccgttgttgctggtcggtatcctcggctggttccacttcaatcccgagcacctggcgatcccggcgcgcagcgagctgccgaacatgggctatgcccag

SEQ ID NO: 642 - DNA, 640 bp, Pseudomonas aeruginosa
  marker
cgccgacttcgacgagcgctacttccagtccgcgccggccgaccagtggaccgaccatctgcgcggcggcgaggaggtcctgctgctcaacctcaccggcgaggagcgcgcggccttccgcgtgccgcgcagggaggtcccggtgaccttcttcctgaaaaagggtggccacgaaaccgcgcaggcacggatcgataccctgctggtggactgcgacgcccgtcgcgtggaagtcacctggcgcattcgccggccgttgaagcgcaacctgttcgagatcgcccaggtgctggtcggcagcaagtccgccgcctggtggcgcgcccgcgagctgggcaaggactactacccctcgcttgccgcgttggcacgcagccgccaggccgaggaggacgaggcatgagccaggtcctgagcatcgtcgcctccggcatggtcagcgcggtcggcctcagcgcgccggccagctgcgcggcgatccgctgcgccctggacaacttccaggagacccgtttcatcgaccagggcggcgaatggttgcttgccgccagcgtgccgctggagcagccctggcgcggccgcgccaagctgctgaagatggctgcgcgagccatcgacgaggccttgcgcgaaaaaaaaa

SEQ ID NO: 643 - DNA, 634 bp, Pseudomonas aeruginosa
  marker
cgaatacctgcgtcgccagttgctcgactatcctgaaggcgaattgtcgaacaaggccggccggcacctcgaccaggcgctcaacgtgcaacctcgctgatccccgccggactgacccagatcaagcgcccgtcgcggcgcctggtctgcaatggcattcccgcccaatgccaggagcgttgccatgaacctgcataacctgctggtggtcgtcgacccgagcagcgacgaacagccggcccttacccgtgcccagtggatcgccgaacgcagcggtgccagcgtcgagttgctgctgtgcgacttcaacccggcgctggacggcgggctgttcttcgacagtcactcgctgcagcgtgcccgcgacctttacctggacgaacgggtcacctggctggagcagctttccatgccgctgcagcaggccggcatccgcactcaggtcgaggcccagtggggcaagccgctggaccggatggtcctgcaacgggtcggcgaaacccggcccgacctggtcctcaagagcacccgcaagcacaacctgctgcgccgcctgctactgggcaacagcgactggcaattgatccgccactgcccgcagccgctctggctggtccatcacgacgcctggcgc

SEQ ID NO: 644 - DNA, 622 bp, Pseudomonas aeruginosa
  marker
ctggctccgcggacggtagaggtagacggtggcgtggctggcatcggcgctcggatgggcgacgaaggccggtccgtccaccgcaccgaagaacgcgccgggcgtgctgcagccgaccaggctcgcgacgatcgacagggccagcgacaggctgcgcagcatgctccatccctcttcttatggttatccgcgcagcataaccagccgggccgggcctgccacccgtcgaaagtccggttctccgggagaacggcctcaggccgggcgcggcaccttggccagcgccggcgccggcatcagccggcgcaccagccacttgcgcaccggcaccacgccgcgctcctggaacagcacgcagaacgccaccagcaggaccaggaacagcgggtagtagagcagcgacgatggcagcgcggccgccgcctcggtgcaggcgcgccagtcgtcgagacaacgccccggcacggcgataaggcgctcgctacgggagaacagggtgaacatcggcacatgcagggcgaacagcgacagcgaggcggcccccaggcgcggcgaccagtggcggacgaaagcgctcttcgggtcggcgggcagcgcgcaaaggcacaccagcagcaactgg

SEQ ID NO: 645 - DNA, 618 bp, Pseudomonas aeruginosa
  marker
tcggtgaaatctactctgtgcaggcgccgaggagcattcctcgccggatgctgcgcagggtaagcgcctgcggcgcggcgcctcactgacctgggtcaagcccgaggcgggtcaaggccttctccaggcgaactttgcgggccccgttggcaatcgccagcaagccgcgatcgcgttgccacaatgcctcccaggtcgaggcgttggcggcgaaggcggcatccagttgcccctccagcgccgagaactgttcgaacagcccagccagtaccgcctgggtgccgacgcaggcgaccggatgccgcgcgacctcggcgcagccgccgaggatgccggccaggcgcagcagcagcggcgagggccagccgcattcatggccgaccccatagagccagccgaccagcgccgccagcacatggacatcctccagcaggcggaacggcctgacgtagtcgtcccaaccatcgccgggcaggcgctcgcaatgggcaccgtcgagcaacaggcgggaatgcggcacatccggcatcagcggcagcgccggcaacgcctccaggcgcgcccccggggcgccggccaggaccaccgtcatcgacagtcgcggcggctgccccggtg

SEQ ID NO: 646 - DNA, 603 bp, Pseudomonas aeruginosa
  marker
ggcacatgccgggggctttttcgttatcgggacgaaagttcgccccttcagtcgcacctcactcgatgacgatccgcgcccggttcttctccagcaacgccgggcctacccctttcacttccagcagttgatccaccgagacgaacggaccatgggccgcacgatactcgaggatcgccctggccttggcctcgccgacaccgttgagcccccgtatcagggcggcctcgtcgaccgtattgatattgacctgctcccccggcgacacggtcgtcgcaggtgtcgttgcggccagcggattcttggcgacggcgaccggtgcggcggaagccgaaaacggaagacaggcgaacaggatgagaagcagagcggatttgattaggtgcatagggtgcactccttcagagatgaatgaccacgtagagggcttcatgcccatccacgaaaccaccttatcgccgtggaacgcacctggatcgacagccccagcaaagcagtcgcttcctggtccggcaccggaaacatcgtacggagaaaacaaaaaaaggccgctaggcggccttttccggagaacgatgactcagggttctcgccgcctctggc

SEQ ID NO: 647 - DNA, 598 bp, Pseudomonas aeruginosa
  marker
gcgcgggctggtggcgatttgaacggactgggacacactgccgctggcgcaaccggggcctgcgctggcaatctctatgccctcgtctttccgcaggaggtcgaaatgaccgtcactctgcgcccggccgtccaggccgacgcgggcttcgccgcgctctgcgtcgccgccgcctatgccccgtggatcgcggtgatcggccgcaagccctggccgatgacccaggactaccacgaggtgatcgccagcgaccgggtcctcatcgccgagcacgacggccagccggtcggcctgctggtgacccgggaaaccgccgacggcttcctcgtcgacaacctcgccgtgcttcccgaatgcaagggccagggcatcggccgacaactgctggagcgtgccgagcgcgacgcgacgagcctcggctaccgctcgctgtacctctacaccaatgagcggatgacggaaaacatcgcgctctacgccagggtcggctacctcgaatacgaacgccgccaggaagagggattccgccgcgtgttcatgcgcaaggccctggcctgacccgaccgatgaccgccgccctccccgacctgagcttcca

SEQ ID NO: 648 - DNA, 567 bp, Pseudomonas aeruginosa
  marker
ttcgccggcctgggccagcagcggggagagacagagggaggaaagacagatgacggcagagaggcgacggatcgcattcatgaggaaaaccttcttcttgttattcggagcaagtctgcgcttgcaatgcttcgagtctattcaagcgttccgcgtcgcgggtaacgaagcgatccgggtttgtcacggagtggttacattgggattgaggcagagcaggaaaatctggacttgaactcggcaaggcggtttcgcgacagaaacctcctacaacacgagaatgacctccagcagcacctccctgcgcgccagcaccttgtcgttccagaaccgcagtaccctggaccccggctctccagccaggcatcggccggcgaacccacatgctgcccgccatccagttcgatcaccagcatccgctcatggcagacgaaatcgacgatgtacggcccgagaaccttctgccgacgaaacttcagcccgagcaatcgatgcccgcgcaaacactgccatagcgcccgctccgcctctgtctgcggctgccgcagaacgaaaaaaaaaaaaaaa

SEQ ID NO: 649 - DNA, 566 bp, Pseudomonas aeruginosa
  marker
gcagtcgccgggtaccaggcggccggcccggtcgccctcccggcaaacgttttcgcaccggacgccgctttccggtgcccgccgcagcgcaaccaggccggcccggcgctttcgccaagccggaagggcgaaccggaagacagtgcaatccgtcgcttcatcggtacaaggagtcatgatgcgtccatccgctgcccattgcctgctgaaaaaactgagcctgggagcttccctggccctggccgaggaacccgcgccagcaccgattaaaccagccgcgcaaaaaaaaaagccttccattacgcaggctaccgccgaactggagcgccgcctggtggaaacggaacgccagcgcgacgaactggtcagtcgtatgcgccaggagaaccgccagttgcgcgagcagctgcaggcggcccaggcgcagcggcaaccgccgctgctcacggaagagcagacctggtatgtcgccggcgccgccacggccctgctcgcgttcgtcctcggtgccctgagccgcggccgccggcgacagcgacgcgaatggatcaattgagcgacactcg

SEQ ID NO: 650 - DNA, 558 bp, Pseudomonas aeruginosa
  marker
atccacccggtcaccggcaacgatctgctcgaccatcgcgaccgagccatctggatgggagccattcgcccgctggacctgtcgatcctggacgaaggcccgcaacgctatgacttcgccgtgccttgaggcgcggtcatcgtcatccagtcgtgcagttcgcattgcagctcgcccagtgccgtcaccaggtcgtcgacggcatcggcgagcttgcgcacggagctttcgccgcaggcgatctccagttggtggcaggcgcgttccacggcgtgggcgtggatcagcgaggccatgcccgccaggcggtgcgccagctcgttgagttcctgggtctgctcgcgctcctgggcgcgccgcagcttgcgggtgtcttcgttgttgctggtcatcagctgcgcgacgagcaggcggctgatctccggttggttggcgcggtcgcccagggcggcggtcaggtcgaacgttcgcatgggatcctcagatcagctcgtggcggcgggcgaaatcgatcaggccggccagggaatgggcgttgagtttcagcatgatgcgtga

SEQ ID NO: 651 - DNA, 551 bp, Pseudomonas aeruginosa
  marker
ccctctatgccgactcacgcgccgacgaagacttccgccgctacgaggaggccatcgcgatccccctcggcgaccgcgagatgcgccttgccctggaccagcccgacccggacatcgaggcggcccgccagggcatcctcaagggcggcaaccatgccgacgacgttaccgcgatcatctggctgtaccgcaacttccacgacttcagttacttcgagcgcgccatcgagctgtggctggtgggcgacaagtacgtcatggaactgatcgacgtaaacgccggcaagatgcgcgcgggcatcggcaccgggcaggccagtgccgagcaggtgcaacagtggaagaccgagatccatgcgatcaacgagaaggtcacgccggcggccaaggccttcagcgacgccctcggcgagggctcgcgggccttgctcaggctgctgctggtggccaacctgaccaccgccagcgtgctcatcctcctggcgttcctgcggacccggcagcaactgatgcagcgccaggaagtggagaacgccctcgatgccgagcgc

SEQ ID NO: 652 - DNA, 546 bp, Pseudomonas aeruginosa
  marker
gatccgcgaggagcccggcggcgcctgaagccgccggcgctccggcacgagagaaccggaacgcggccgggtttcctccggccgcgctacccctgcgaagaggttcgactcttttgcccgttcgtccagacgcttcctcctgggggcccgacgaccggacgcagtatcgacgacgaagacgctgccatgggcgctgcgccaatctgccgcgccggggccggtcgtgtcgctcgcaccggggccgagggcccggaaaacctgaaaccaacacgccggtagggaacccagctcactcatgtttcccggcggaatcgtcgggttgtcatgaaacccgagtgatctgggcttacatcggcacttgaagaacacgggtcgaacaggcagggtgctgccgtgaaaaggcccggaacaggagtcggacatgcaacattccattggcaagacactgctggtagccgctctggctacggcgatcgcgggccccgtgcaggcggagaagaagagcctgcacatctataactggaccgattacatcgctcccaccac

SEQ ID NO: 653 - DNA, 543 bp, Pseudomonas aeruginosa
  marker
tccgggacgaagccggctgccgcgcaggcggcgacgatcaggtcgtgcatgcccggcccatagtgccgtggaaacagcagccagggttctccggccagttgttccaggcgcaggcgcgcatggcgtgccagccgatgcccttcgggcaatgccacgcgcatgtcgccgtccaccagtagatgtgtgtacaggccgggctggcggtcgaccggcaggacgatcaggccggcatcgatgcggtcttcgcgcaacgcctccagttgccccgcggtggtgtcttcctggagctggaagtccagcgcgccatgctggtggcggaacgcctggagtatgcgcggtagcagaatattgatggtgctgtcgacgaacgccaggcgcaacgttctgcgtccgctggcggcgctgcgcgcggccgccagggtgcgttcggcctgggccagggtgcgccgggcttcgtcgaggaacgcgcggcctgccggcgtcaggcggtggatacggttgtcacgctccagcaggctggcgccgacttcttcttccagccgc

SEQ ID NO: 654 - DNA, 524 bp, Pseudomonas aeruginosa
  marker
gtaaccagcgcgctgcccgacgccagctcctgttgcagcggcagcccggccttgggcggcggggaggcggataccgcggtggcaacgctgagggacaggaacagggtgaccagtgacaggagacggtttctcacgtgcgttgctcactaagacgagaaagtgggggccgtggggcgcagtgtgaactggtgcccataattgagcattttatgctcttttgtaggaaaagcacgtagggctttgaaagtgctgacttatggttggcccggttcagagaggttcgagcggataacgcctgtggcgttattcgccctacgcccacaaggtcgtggtgcggtagggcgaataaccgcaacgcggttatccgccgcctcggcgggagtgcgcggcattcgctggggcgaaaaaaagccggccatcacagccggctcagggtaaccgtgagggttcagtccgcgcagacctgggcgatggcttgcgccaggcggtcgaggcggcgcgcgtcgagaccggcgacgttggcc

SEQ ID NO: 655 - DNA, 515 bp, Pseudomonas aeruginosa
  marker
cagcaggtcgcgttcaacgacggcctcggggcagcgagcccggtgcgcatgggcgaatgcctggccctgccgaaacagtcctgacctcgccgggacggagcgccccgagcgtctccgtcccatctctccccgccgccgggacctcccggcgggatcgtggcgtccgaaaggctgcgggtccatttcgatgctgctagagttcggaaaggtcctatcgagaaaacctgtgccgaacccctcggtcaggaaagcggactgccgcacagttcctgtcctggccacgacgatgaacccgcctcccgtgttaagaaagaggaggcgcagccgcggcgatcggaagtccggcacctctccggggcttcaatccccccgtagagccttttcagtagcggagccgtctaaccccccatggaaaaccagagcccccacctctcgttgcgcgtccccactccgacgcagcagaacctgagcttctgcgacgccaccccgaaggacatcaagtactggctggcgca

SEQ ID NO: 656 - DNA, 512 bp, Pseudomonas aeruginosa
  marker
ctggtcagcgcctcgagcacccgggtcacgtagtactcgccgaacgaggggccccaccagggatgctcgcagtagcagtagggcgcgacgatccacgacacctgcggcagcgtgttctcctgcacatccttgcgcaactggtcgacgccgcgggcgagcatggcgcgctgccagaggtccgaatcgcgcggagcgttcttgaagttcctgaaccaggcgagggcgttgcagtcgtagttgttctgctcctggagccggtatttccagtaggcgtcgacgtacaggtaccagagtgacgaggagcggtagccgccttcctggtagacccgccagtccacgccagcggcgcttagccgctcgggataggtggtccagtccaccgtgccgctggcgccgatggtgccgtcgcccatgtcgttgccgatgtgtacgtccttgccgtcgccgctgggggcggcgcgtccgctcatgtggtagaggcggttcggattggtcgggcccatcatcgactg

SEQ ID NO: 657 - DNA, 509 bp, Pseudomonas aeruginosa
  marker
cgaggacggcacggtcagcctcgacggcgagcgcgagggcgacttctggcacctgcgcctgcaggaccagggccctggcgtggcggaagaccagttggaacgcatcttcctcccctaccagcgcctggacgatagcgccggcgaaggtttcggcctcggcctggcgatcgcccggcgcgccatcgagctacagggcggccggctctgggccagcaacggcaagcccggattgtgcctgcacctgtggctgccggcggccgcctgagggcgaagtgtttagaaagttaatgcgctttactctcaaataacaatcaatatcatttgtgatctcttgcatttcgctgcattgcccggagatcaccgatgtcctcacgcgcccttcccgccgttcccttcctgctgctgtccagttgcctgctcgccaacgccgtacacgccgccggccagggcgacggctccgtcatcgagctgggcgagcagaccgtggtcgccaccgcccaggaggaaac

SEQ ID NO: 658 - DNA, 507 bp, Pseudomonas aeruginosa
  marker
ggcggcgttctggccgggctgggtatgcagccaggaggggttgaactggacgtcgacggctcgggcgccgggacgtgctgctttggcctgggcctcccccttgatctggccgctgccctggcagccggcgagcgcaccggcgatgagcaggatggacacccgaacggcgcgagccagggcgtctagatcgggggttttacgtgtctgtggcggcatcggctgagtgctgttccgggcaaaaattcagccgattctagaaatgacctcaagagtggtcaagatttcgccaaccttcagaactggtccttccaggccctcaggacggcgaaaacctcctccggggtgcggttttgctggccgctccgctggtcggcttttttcttaacagaattttccgaaacgcgaagaaatggattggtcgacaattccagcgagatttccgacggcagggtgatgcggtcccgttcgcgcagccgggtcgcttcctcgaagcgttcccgcagcgcc

SEQ ID NO: 659 - DNA, 500 bp, Pseudomonas aeruginosa
  marker
gggatgctggaaaacgccaacaagaccatggcttcgctggagcgcaccagcgccaccctcgaccagttgatcagcgagaatcgccactcgctggacggcggcatccagggactcgccgagctgggcccggcggtcagcgaactgcgcgataccctggcggcactgcgcggaatcagccggcgcctggaagagaacccggcgaactacctgctgggccgggaaaaaaccaaggagttcaccccatgaggctcgcccttcgcccgctgcgtcgcctgtccctggccgccggcctggccgcgctcgccaccctcggcgcctgctcgatcctgccggaggcgcaggtcctccaggtctacctgctaccggtgcacaaccctccggccagcgccgccgcgcggccggtcgactggtcgctgcggatcgcccggccgcgtaccagcctggtgctggagagcccgcgcatcgcggtgcgcccgcacggcgacgaaatcagcgtgtac

SEQ ID NO: 660 - DNA, 488 bp, Pseudomonas aeruginosa
  marker
ccgcgccctgcgctgagcctttgcgatgacgccaggacgcgtcatccgtgcgccgctgcccgggaggcggatcgcacgaacggaggcaaaggcgcctccggccggttccgggaaggtcacggacgaccttcccggagtcactttcctcatgtcccggtctttccgcaacgcctcgcccgagcacgccggaaacagcccctcgccgcgatagaggattcctgcctgatccacatcaagccgacctcgcctgaaagccgttacaacagcggcgtgaccgtcgtcctgtcgacggccgcataacgaaaaaaaagaatggaccgtggccgaggggaccgccccaggcctacgcctaaggatgaggaaatgcctgcttctttcccgcgcctcggcttgctcggcgcgctgtgctccatcgttcccctgctccatgccagcgaaccgaccacggacgctgcgctcatcgaaaaaggccgctacgtggcccagct

SEQ ID NO: 661 - DNA, 476 bp, Pseudomonas aeruginosa
  marker
cagttggtcgaagggatgggacatgacggggcatccaaggctcgaaagacccctagtgtacgcaagccggcgcgggccggcaggttcacagcggcgtgccgagcaggacctgggctggatcgaaggaggcgatcaccttctggcccttcttcagccccaggctggccaggcgttcgccggacagcagcgcgcagagggtaagaccgctgcccagggcgatgcgcacctcgctgggaccggccttggccgcgaggatttcctccagggtgccgtgcaactggttcggctggtcctcgcgcggttccagcccgacgtccagccagccggccttgatcagcgccagtaccgggcggccgcgaccgagttcgagttgctcggtgctggcgcgggtgatcagcgcctcgatgcgttgctggcctggcagctcgatggcgatgcggtcgtggaagccttcgccatggatcgacaggacccgc

SEQ ID NO: 662 - DNA, 470 bp, Pseudomonas aeruginosa
  marker
cgccgccgcccgccagctcgaagccagcctggggctgcgcgccgactacctgcatacccacgcggcgatgccgcgcagcctgctgttcgacgcggaaatgctcgccggctacgagcgtttcgtgctgcaacatgaggaacgtcaccgccaggccttcgacgacctgctggcagcctacccggagatcgccgcggagcgccgccacctgctggccggctatgccgagcaggcgatccccgacttcgtccgggccaacgacatcgacctgctgctgatgggcgcggtcgcccgggggcacctggacaacgcactgatcgggcagaccgccgaacgcgtcctggaggaggtggaatgcgacctgctggtgctcaaaccgacaaatgacatctgatgcagatagtatgactccgcagtcgccgccgagcctcgccggtggtagcctgcacgccagcgttatccaaggagtcctt

SEQ ID NO: 663 - DNA, 470 bp, Pseudomonas aeruginosa
  marker
ctggtgaagcacaggcgcatggccgcgccgatctccctgtcgctgacccgcaccaggcgatcggcgccggccaggatcatttccagcgcgctcgggtccggcgtactgcacgccatgccgtcggccaggcgggtgtcgaccgggtggctgatcgccgtgccggcctcgaacgacagggcgtaggccggcgcatgggcggacaccacgccgacgatgcgggtcttcaggcccagcgcgtcgcgcgcggcgatcagaccgcagatgcccgaacccataccgatcggcacgtagacttcgtcaaggtcggccagcgcggcgaacaactccaggctgtagctggcgaccccggccaccagccagggatggaacgccggaatcaggtgcaggccttcgcgccgggcgcgctcggcggcgtattcgcgggaggcctggaagtcctcgccgtgctcaatcagctccgcgccaaggct

SEQ ID NO: 664 - DNA, 468 bp, Pseudomonas aeruginosa
  marker
agactcctggagcgggactcagtgaccgtgttccgccgagcccttgcccagttcggatttgaggatgaagctgccgctggcggcgacctggctgccggcgcgcaggccctcgaggacctcgacgcgctggccgtcgctgatgcccagcttgaccggctggaccacgaagccatcggccacgcggacgaacaccacgtcctcgccgtcgacgttctgcaccgcgccgtcggcgaccgtcaggacttccttgcgggtcgcctcggccacctgcacggaaacgaacaggcccgggcgccaggtgctctcggggttgctcagggtgacccgggcggtggccgcgcgggtctgctcgccgagcaggtcgccgatgtaggacacggtgccctccacctcgctatccagcgcctgggcgagcaccttgaccttgctgccgacgcggacctggccgagcagttgcgcgggcacgtt

SEQ ID NO: 665 - DNA, 462 bp, Pseudomonas aeruginosa
  marker
tgacatgaggaccggacgtgcgaaatgaacaggaataaggagggggactgctaggctccctcttgttatcggttgctagccgcaagactatagtccgaatactcgaaaagccagttcgccgcctcgccgacaccgagcccgacacccatgacagaccgcctcgccgcctggctcgaagagctcgaccggcaacccctgccgatccccgccagccactatgccggcctgcacgccgcgctgagcgacagccgccgctcgctgcgcgagatcgccgaccagttgcagggcagcccgacgctggcgttgtccatcctgcgcgaggccaatcgcgccgagagcgcccgcgacaaccccgcggaaagcctggaggtggccctcagccgcctcggcctggcgcgcgcgagccaacttctgaagaccctgccgagcatccaggatgcggagatgcccagggtcctcggg

SEQ ID NO: 666 - DNA, 462 bp, Pseudomonas aeruginosa
  marker
accggtttccttgccgccctggcggatcatcccggccatcggcggcgagccgcaggcggggcacagggtccggctctcggtctcgaccaccgcgccctcctccagtcccagcagccaatggctccaggctacctgcagggcggcgccgaggaacggcaccagggccgccggcaggaggtcgaactgaccgctgagcaaggcgatggcccaggccttgcgctggccttcgtcggcttcgcgcaattgttcgagtgccgcgccgacggcggcgttggccggtgccgggtagcccgcgagcagggcatccagccagggcagccaggcgccttcgcgcaccagcaggtcgtaggccagcggcggcatgccgtgctcgcggctcttgcgcaggcgctcggggtcgagcggggccagggccggcgggttgtccagcagcgcctgctggagccggcagagaccggcgac

SEQ ID NO: 667 - DNA, 454 bp, Pseudomonas aeruginosa
  marker
cgcacccgggtgccgctgccgtccaggcttttctccagccagccgaacttcctgagcgccaggctggtgggggcgtagtaggcatagtcgagacggatttcagcgggggaaacggcggcctctgccgcgggaaacacggcaagaacggcgagcagggccagccaggcccggcagcgacggagagcggcgatcatgcgtctgctcctggaaggaggtggatgagcgagccttctccccgtctggcgggcaagtcagagccggtttcggaaatggatggcggataaaaagcgtcgcggcgacgcgctggcgcacataaaaaagagggccggtcgaaaccggccaaaaaccctgctcgtggctaaacagcgttgcatgacggcacgcaccgtcgaataaaaggtcccgcctgccgtgcctgcccatgcaggcgggacgaatccggcctcagcggttg

SEQ ID NO: 668 - DNA, 450 bp, Pseudomonas aeruginosa
  marker
cgctacgagaccgactggagctactacggggtccccggcctgagcaccggcgtgtggtacgtgaagggctgggacatcgacggcacccactacgacggcgatcgcaacggtgcctacggcaactacgccgaggtgcgcgcccaggacggcgagaagcaccacgagctgggcctgatggcggcctacaaggtgcagaacgggccgatcaaggacagcaccttcaagctcacctacatgatgcacaaggccagccagaaccaggtcgacggcagcgtcaacgaactgcgcctggtcagcaccttccccttcaacctgctgtaaacctgcgacaaccggcggccccggcgacggggcccacgaggaggaccccatgctccatccgttgctccgacacctgcaaaaaaccctggccctggcgctatgcgccgccggcgcggcccaggcgaagaa

SEQ ID NO: 669 - DNA, 446 bp, Pseudomonas aeruginosa
  marker
cggccgtcgcgctcctgcagttcgacgaccaggcgccagccctcgccgtcctccgaccactgccagcgcccctgcaaggggcgggtcgagaccaggctcaacagcagcgcctttccctcctcgcggacgcgccagcgcaacggctggcccagccatcgcccgtctccctgctgcgccgcgccccgggcgacgatgcgcaacgtcagggcaccctccacccgtgccgccgtaaccgcagcctggcgatcgaagcgcaggaccaggccctgctcgctctccccgaccgccagcagttgcggcgcagacgtcggcagcgaagcgggaccgaacaacctgccgagcatcagcccgaacaacaacccggcaagcaccagcgcaccccagactttccagcgctggcgccgcagatcgtcgatggcggaggtagaatgccgcccgttatctgc

SEQ ID NO: 670 - DNA, 443 bp, Pseudomonas aeruginosa
  marker
gcggaacagccgctgccaatggggacgcacgccgccctggcgatcgagcaactcgtggtaggccgtatcggtgaacggatagtgggcaagcagctcgggcatcgaaggctcgcggggctggggttgcggtcactgtagcggagtcggcggcgcgacgccggagcgaagcgacgaggcgttgccgggtccgccacgacggttcttcgtgaagaccgggatagccccggaagcgcaagacttgtgccagcgccgtcaggcccgggcggccaggaggtcgtgccgcggcaatgcactgcgacggtgcgcgaccgcaggcaaggttgcagccgcgcacgctttgcgggcggcagggccgccccggcgaatcagcgcgggatgttcggctggcgcgacttcttcttgcccttggcgaaggccgtcgccttgttctgctggcccttgct

SEQ ID NO: 671 - DNA, 441 bp, Pseudomonas aeruginosa
  marker
agtgttctccaggagtgcgtatccggcagtttaggccttcgctcccgccttgggttccgctgccgtcgcttcctcgtgggcatttttcgccgcgctgcgggtcggaaatagattgcccgccgcacggcctcaccagcgcgcgcgggtcgaaccgatccagccgagggcgccgtccaccggcacgcagtcgccgtcgtcgtggcgcagggtgccgttgaaacggccgaaccactggcgggtattggcatagaacaggccgacgctgggccgcgcctggtgcagctgttcgggacggaagagcagctcgacgcgaccgcaggcgctgtccaggcgccattcggccagcgggtcgcgaggctcgcggatgtgcacgtcgtcgagcacgcggctgagcttgccgccgaaccacagggcgttctcgcgcaggtcgctggcttcggt

SEQ ID NO: 672 - DNA, 432 bp, Pseudomonas aeruginosa
  marker
gccagcaggaagtcctgcgcatcggcggcacgccttccggcacccagaagcgcctgatgaaaccggggagctgcaacagctacatcctcaacaaggacggccagcagcagccgttctacgtcagtttcgacggcagcggcaaggtcgacggctcgggcttcctgagctgctccgagctggaccgccacgagcgcgacgcccgcccctgacggctcgacgccccgcttccttacggaggcggggcgtctgcgttcaggcccgggacagggcctcgatcagttcggccttgcgcatcgtcgaacgaccgcggatgtcgcgcttgcgcgccagctgcatcaattcctcgcgggtcatctcgctcaccgaggtgctgccttgacgtttgccacggctcgccgagccgcggttggccggtctccctgagcgggcctg

SEQ ID NO: 673 - DNA, 431 bp, Pseudomonas aeruginosa
  marker
cggctcggccgatggaaggtgcgcaggaaggcatagccccaggacaacggcagccacggacagcggtcacgcaggtattcgggaaagcgcgtatggatcgccgaggtgaagtccaggccgcgcttgcccagccagcgccgcgcggcccagccgagcggcccctcggtggccaggtgcacggcatccggggcgaaggcctcgatcagcccgccgaggcgccagaggttccaggccagggggatttccggatagctgggacagggcaggcagcggaagtcggcgggcgacagcacccgtacctggtggcccagcagttccagctcgcgctgcagggccagcaggctggtgacgactccgttgacttgcggtaaccaggcgtcgctgacgatcaatagcctcatgccgccggctcgaccgccgcggcctgcgcc

SEQ ID NO: 674 - DNA, 429 bp, Pseudomonas aeruginosa
  marker
ctcagggctggcatagggaatggttctccgatgggatgcgggctgaaaccttagcagactggcgaaagcccgcgacagagcctgtttgtccgcgcatttcaggctggcgcctggtacaggcaatagtggttgcgctggcgcttggcctcgtacatggcgctgtcggcggcacggaccagtccttcggcatcgccggcatgccgcgggtagagagcgatgccgatgctcggggtgacgaagtcgatgcgttcgccattcagcgcgatcggttggaccagcgccgccagcaggcgttctgcgaggcgctgcggattgttttcctggctgtcctcgaggagcacggcgaattcgtcgccgcccaggcggtaggccttgtccggctgccgcagggtgctgcgtacccgttcggcgacggtcctgaggagggca

SEQ ID NO: 675 - DNA, 426 bp, Pseudomonas aeruginosa
  marker
gatccggggcgatcaacgtcaaggccgacaagaacgtggtggtgaagggacgcaagatcctccagaactgaagcggcgcagagccagggagtacagcgcatgagtgtcgagatccatctacccggggccacgacggcccttcccgcgcgcctggacggcgtggtcatcggcgtcctcctcgacgtgccggacgccgccgctccggtggtcgcctatcccggttgcccgagcgagcacggcctggcggcggcaaacaccaccacccagctcagtcgcgccgacatcggcgcccaggtagcgctgatgttcgtcgccggcgatccgcgccagccgctgctgatcggccgcatccagcgcctgccgcaggaagcgctggcgcaactggacggcgagcgcctggagttcagtgccgaacgcgagatcgtc

SEQ ID NO: 676 - DNA, 424 bp, Pseudomonas aeruginosa
  marker
catggcgtcgaactgctggcgcggcattaccaaatcccggtctatctcagtgcgggtaccctgagcggcatgcgccgcccggtgcaccccgccgagctgttgagggccggccagcgcctggcgatccgcgggctggaagtgcaggtggttggcgtctcgcacgacgcccgcgagcctacccagttcgtgctgtccgatgggcagcggcgcttcggcatgctcaccgatctgggaatggccacggccgaggtgctggagtgctatcgtgcggtggatgctctggtggtcgaggccaaccacgacagcacgatgcttgccggtggcccgtatccctattttctcaaggcccgcgtaggcggttcgcgagggcacttgaacaaccatcagtccgcagaactggtgaagcagctggattggggccgca

SEQ ID NO: 677 - DNA, 422 bp, Pseudomonas aeruginosa
  marker
ttgcgcgccaggcggcgcaggtcttcgatatcggtgatgacgctcatgcagtccactccttcaagggggtggctggatggtagagcgcgacgtaccgccgcaggcggaataattgtcggcatcggcggaaggaaattccgccgtttcagtcgtccgccgccggaaggaattccctgccctggaccaccgcctcgcggcagatcgccgccagccaggcggcgaaacgctggctggccggcgaggcctggtggctgcgcaggtggtaatggtgggtgggcgccgaacgcagcgggaacagcaccaccagccgcccctcggcaagccaggcgcgcgccagcgagggtcgcgcgagggccacgccctggccgttggcggcggcttccagggtcatgcccaaatcgagcaggcgcggcccggcgcag

SEQ ID NO: 678 - DNA, 420 bp, Pseudomonas aeruginosa
  marker
tcgcctcttcattgtcgtcgccggccgtcgcggcccggcgacgtacgcgaggaccagacgaccggtctagtcgtcgaatcggcactatgcggcgccttccgccgccgcgccagcagcgtcagtcggctgaatcgccaggcatcaggctggccgatgggcgcggtagaggggaggcgtgccgtttgtccggctgtcaactatccacctgggaattccggcgcggcgaaagccggtgctaaaccttgtctcttcgagtccacaaccctgtccgacaagaccaataaaagcgtggagaccgcatgaccgacgaccactccttccgccctcgccccacctcgttgtcagccgccctgctgctgggcgcctggatcgcacagccggccacggccgcctatgtcgaagccggtcggcccggcgatc

SEQ ID NO: 679 - DNA, 420 bp, Pseudomonas aeruginosa
  marker
gatccccgccggatccgcctggcgatccgtcccgacctggccagccagcatttccagtggttccacttcaaggtcgagggcatggctgccgccaccgagcaccgcttcaccctggtcaacgccggccagtcggcctacagccatgcctggagcggctaccaggcagtcgcctcgtacgatggcgaacgctggttccgcgtaccgtcgcaatacgacgccgacggcctgcatttccagctggaaccggaggaaagcgaagtccgcttcgcctacttcgagccctacagccgcgaacggcatgcccgcctggtcgaacgtgcgctcggcatcgagggcgtcgaacggctcgccgtcggcaccagcgtgcaaggccgcgacatcgaattgctgcgggtcaggcgccatcccgacagccacctg

SEQ ID NO: 680 - DNA, 412 bp, Pseudomonas aeruginosa
  marker
gcttggccggcacttccccgccgccgccaccgtgatagaactggacccgtcgcgactgcccggcggcgttgcgcacctcgacgctgttgctgccggacgggaaggcgaacgggcggtcgaagctgccatcggcgtccaccttcagtggcatgctcacaccgttcaccaccagcgtcgccgggcggtccttgggctggctctcgatcgcgccgcgaatgcgcgcggtggtcgcctggtcggcggcgacgttgaccgaggacgccgggtagttcaccacctgccggtaattggcggcggaaccgtcgccggcacgccagccggagaccggcgtatccagtttcacggggttgtccgcccaggcgacgaggggaaggcaactgagcagggcggcaagggacattcggttcatgga

SEQ ID NO: 681 - DNA, 408 bp, Pseudomonas aeruginosa
  marker
ctcatggcgctgctccgctgtggggtcgaaaaagggcggccagcctagcacagaaggcccttcccccctaccggcgcagccgcttgtgctcaaccctggcggatcgacagcggcagcccgccgataaacgaacccgactcggccaggagtccacacatctcgtcatcgacatcggcgcacaccaactccaccggaaccctgtccagcccgcgcagtacctggcgcgcatgctccacggagcgcaggctgaccggctggccgagatcgtcctccaccggataggcgcggtcgcccatctgcgcctccaggacatagatgccgccctccagcgacaccaggtgcaaggcgtcgatatgtccggcctggacccggccggcgagatcctgcatgttcatcgcgaacctctcg

SEQ ID NO: 682 - DNA, 406 bp, Pseudomonas aeruginosa
  marker
cgagggtagcggcgtctcgaggtcgacgcgggaaaacaccagcgcgaactcctcggcgtgaaagcgcagcggcgcgcggaacagctcgacatagggtgccagcggctcgcggggcgcgccgggcagttccaccgccagcgggtccagcgaccggccggtgatccagcggaccatgtccaccaggtaggccagcgagcattcggcactctgcggtggcgccggcaggcgatcgccatgcaccgtgacgccgattcgatagccctgcggcgtgcggcggaaagtcaggtcggacgcttccgcgatgatccgctggtagcgctccaggcgcgcgaagccttccgccaggttgcggctcgacatcagcgcatagccgacgacgtggaaagccgggcgccggacccgggcg

SEQ ID NO: 683 - DNA, 401 bp, Pseudomonas aeruginosa
  marker
ggcctccatcggccgcagcgagactctgggcggtgcctgcttcaccctggcctggccgcgcaaggcgggtctgcgcgaccgctgaaaagccgacggaaatatggcggctagctatctgcaagtgcatgcgcagacgtattccaggcgtagcgaaaacatatcgaaaggccagtcccgccgggcgtggcgagtattccgccaggggctaaaaaaagtccttttcagttggactcgtttgtttatactccgggacgcggtggctagtggaacgccattcgaaatgcccgctccaacggcattttgccggggtcggataacaagaacagcgttgcgcagccgaaccgtcgaagtcttcccggattgggaaggccacttataaaaaaattgcaagttggagagtg

SEQ ID NO: 684 - DNA, 399 bp, Pseudomonas aeruginosa
  marker
ctgatacaggcgtagctgaaggaagccgcatggtagcgcatccgcgcccgaccgagcacccgcagaatcgaccggcgccggcacgctgggaaaggcgagaggaatcggacgttgcggcctacgcgaagcgcgacaagaatcacactttgcgctatacaagcgccgacccggattccaccgctatggagcagcccatgaccctgcgcccgatcgccctgctggccgtccttctcctcgccgcttgttccagcgacaagccgaagcctgcgccaacgccgcaagcttcgcgcagcgtgaccatggtcgagccggtgctaccggcccacctgcgcgagctgagcggaacgctgagcagcatccagggcagcctgccacgcggcagcgaggtgcagatggcac

SEQ ID NO: 685 - DNA, 399 bp, Pseudomonas aeruginosa
  marker
ccgcctgcaggcctcggtcggcctgtacaaggccctcggcggcggctggcagagcgaccgccagggtctcgcgcggaaagactgaggcccgcgttgcgcgggcctcctccatccttactcgctctttcgccgttcagcgcctgagctggtcgcgcgccagcttcaggttgcgcgcgtaccagggccgccgcggcgcacgcttgagccagccgctcaactggtcttcttcgctgaagatgatgcgcaaagccagcttcatggtttccacgtccagctccaccgagttgctgctcgcctggacatccgaaagcccgcatccatgggtcgccgggcccagccagggatcgccgacctcgacccatcgaccgggcgcgaaccattggatgccctccacttcgc

SEQ ID NO: 686 - DNA, 398 bp, Pseudomonas aeruginosa
  marker
gaaggtggcgatgaacaccaccaacgccgccagcagcaggaccaggctggcgaggctccaggtcaggatctttcggccgcgcgtcatgcacaactccttttcgccgcgtcggttgtcgggcaggcgcggcagcgcgcctcgctcagcccgtcagtgtgcaggctggcccatggactcgccagcgcgaatacgccggcccgttccgttaggaccggcgaaacgccggcattgctccccgtcccacgcatttcaggcaaaaggccagttcggcggcgggtcgataaaactttttcgaccgcgtgggactcacaccttaggtaagcagaaaaaagccggccgcagagccggcccaattttcaccggatcagcctcaaggagaaaaccgatgaccaccgttc

SEQ ID NO: 687 - DNA, 394 bp, Pseudomonas aeruginosa
  marker
cagcacctggtggctggccacctcgacgccgcgacggctcagccagtccctggcacgctccagcaacaccccggagcgggagcgtacgctgggacttccggcgatggaaacgacgagcataggggggattccttataaccggaaaacagaatattcgtttggcttgctaaccaagttgcatagaccttaacaggcggcctcatattccaataaatgttttttattcatttatttattccataaagaatataagaaacccggttcggggtcttgacctcagagcacgtgcgcccgctgcatttcggtcagggcctcgccgcgcaagtaggccagctccaccgcccggcgatcgcggggacgcgccagcggtacgtggaactcgcggcggatgtgt

SEQ ID NO: 688 - DNA, 394 bp, Pseudomonas aeruginosa
  marker
agggggggagcttcggctcccccagtagcttcaccccctccctccgttttccaccgtttttccttcgccttacaccatttccccatccaatgctagaatccgcgcagactatgcggccatccgcatgccttgccagattcaccgcagccttccacggccctctcccgcttcgcgggaacaggatgtacggcccctgttcgtttctgtcaggatgcatggcgcagtcggttccggcgcccgggacgccctgtgcgtcgcggggccaaacattcaacgggtacagaacacgcctcgcccgagaggtcctgataatgccgcagcattacccgacgtccgtcctgtttgagcaacgcaggcgtgcaatcacccacatcgtgctcccgataacacatcc

SEQ ID NO: 689 - DNA, 388 bp, Pseudomonas aeruginosa
  marker
gaccgtcgaagtcatggaagcgctgcgcgagatcggcatcgactatgcccagggcctggccatcggcgcgcccctgccgttcagtcgccagcctccgggggctggagtggatgcccagggcctgtggtcgagcctgggacagaacctccggtaggtgaccgcggggcgaagaaagagtagtttcgctgctatgaggccgttgccgacaagaaagagaagggagacgggtgtgagcgagttctttgaccgtacgggccccttgcaggaggcgggaagctatccgcagtgggcgcagcaactgatcgtcgactgccaggcgagcaaggaccgggtttccggtcacgagctgtaccggcgcatgcgcgacgccgagctgagcccggcgctg

SEQ ID NO: 690 - DNA, 387 bp, Pseudomonas aeruginosa
  marker
cggagaggggactgggttgcagacggcccgctacagcgagcttggattcttcgcattcgtcgaacgcaagtcaagctttattctgaaaattatcaaaaaaaaattccaaggaagctgccatacccttccataaaaaagctgatcaatgaccaaaaacagattttatggctagaaaattccgatttagagcaaacttttccaaaatgcccatgattcccgcgaggacttgccacggcgaggccgtctccggcggcggttgtgatgccgtgcagcatgccgcgctggcggatttggttatagttagccgcagttagcgcaattccaaggactccgcatgcgacgcatgatcctcccggccagcttgttgctcgccctctcctctttcgc

SEQ ID NO: 691 - DNA, 384 bp, Pseudomonas aeruginosa
  marker
cgccgcgaccagcaggtagtggttggtggcgaactcgatcagacgggaaacgaattgcatggtgacggatatccagggcgtaaaaaatgccggccagtatacagaccgcgccggccaggggggaacccgccgggcggcgccccgctcggctccaggaaatggcgtcgcgggaaacttcacggttagaatgccggtccttttctgtgaagctggccagttccggcccgggcacggttcgggcgggacagagggagcgaggatagcggcattcggttgcggatcggcgtcatcggtttaatcaatcagcctcttcctacgtcttgaacgacaatgttcccactaaatttggtcagtttctgaaccccgcggaaatagagccggaca

SEQ ID NO: 692 - DNA, 379 bp, Pseudomonas aeruginosa
  marker
cggcccgcagcctgcgcgagcgtggcctggctgaagagcgcctggccctcgcggtcgaggtgctcgacgaccaggccctgcgcgacctgctgcaacgctacgaccaggtgattaccctctgatggccacgaccctccacgtactgtcccgctcgccgttcaatgacggccgcctgggcagttgcctgtacctgctcaaccccggcgacggcctgctgctctgcggcgacgccgtgcacgccctgctggccggcagccacgcctgccaggccctggaactgatgccggcggaaatcgaactgttcgccctgctggaagacctccaggcgcgcggtatcgaggacgtccccgctcgcctggtggcggtggactaccccggc

SEQ ID NO: 693 - DNA, 379 bp, Pseudomonas aeruginosa
  marker
aaaccttgacaggtcgacgaccagtctacggcaaagggctgcgagagtccaatccgccgctcataaacctttgacgccgctgggtttcccctccggaggcgggctcaggtccaggggtttgtccggtgccttggcgttccgcccgggcgccagctgtttttccacgtcggcctggatcgcctgcaacaccggttgcaggtcgcgcatgttgtcgcggacctcggggtaagggtggtccttggcgaaagcggcgatgcgttccagcaactgggcgcgcaccggggagggcaggtggatgaacagctcgggcatttccttggccagttcggcggagtagagcaccaggtcctggcgctcgaactgggcggtgaggccgagg

SEQ ID NO: 694 - DNA, 377 bp, Pseudomonas aeruginosa
  marker
ggccgtacttgcccttgatggcctcggacagggtgaagctctcgacgatctcgccattgcccagtaccgcggcaacgttgaagtcaggcgctttcttacctacgagtacgctcattccatgtctcctttaagcggaaggttgaaggacggcaccgcagcctgccggctcctcgtgaagcctcgatggcaggggcgccgttccccgggaaacaaccatcatacaccccgccccagccggcgctaagtctttgtccgacaaagccatttgtcaggggggcgaaaaaaaacccgactaaaacgctccagggaactttgacaatcattctcattattattagtatcttttccaactcaactatcccagtagccagatcgcc

SEQ ID NO: 695 - DNA, 377 bp, Pseudomonas aeruginosa
  marker
tctcctgcatcaggcaaaggacacccgggacatggccggatgtctctggttaaaagatagccagcctggcgaggtacgccagccgggcatggctacggggcagcgaaccctacacgaacgctgggtttttctgccttgaccggagtcattacacggcggcgcaaaccttgtccagcaaggtgcgcggaatcgggacaggtccgaacgccgcgaggcgcgcgaacaggaggtgatatccaggtgccattagaccaaagactaatgccgggtcgcctagggctgcggcgacccggcgagcggatcagagtccgacgttcctgaggcgattggcatgctgccgatagacctgggtcgggtcgctctcgaacaggctgacc

SEQ ID NO: 696 - DNA, 371 bp, Pseudomonas aeruginosa
  marker
ttggtcgccgcgtccttgtcggccacctgcagggcgatgtcggccttgtagtactgcaggcgcggcccgctgccgtagttgccgaccagcgccggggtcaggtcgacgtagaccggcttgttcgcgccctcgccttccggagcggcctcctcggccgaggcgaacgacgggaacagactcaggcacagggccagcgacagggcaatgggggttctcacgggcgcatctcctcgacgaatgccggcaagcatagccagactctcggccgggcccaagcccggggtttatggacaaccatcagttgcggcgatgctgattgacccccggcgtctccctcctacactggccggaccgcaaactggagcgtcccc

SEQ ID NO: 697 - DNA, 370 bp, Pseudomonas aeruginosa
  marker
ctgggcgttcgccgcatcgcccgtggccagcgccttgccggccaactgaccgaacggcaccggcttgccgagcgggtcgaccagcacttccagacgggtcttcaaacgctggtcgtcgaggctgacgctacccttgtcgaaaccgatctcgcggatgtccagttgccaggcggacggctcgtcgctgtcgctggcaggcaggtcgaaatcccaattggcgcggccgtcggccaggcgcaggagctcggcgcgcggctgggtcagcttgatctgtggaatgcggatggtctgccagagcaacggcaacggcgcgaggcggaattcgatgcgttccaggctggcgaactcgctcgccttggtcttgcccgcc

SEQ ID NO: 698 - DNA, 361 bp, Pseudomonas aeruginosa
  marker
agtctctatgcccagcccatcgtgccgctgggcgaaggtgcggaggagggcttgcacgtcgaactgctgctgcgcctgcgcgacgagggcgggcgcctggtgccgccgctgagcttcatacccgccgccgagcgctacggcctgatgacgctgatcgatcgctgggtggtggagaatgccttccgcacccttgtcgagcgcgcccaggaccctcgcgccgagccgatcggcacctgcgccatcaatctctccggcgcgaccatcggcgacgagtcgttcctgcagttcctcaccgagctgttcgcccgttaccgcattccgccgcagacgatctgcttcgaggtcaccgaaaccgtggcgg

SEQ ID NO: 699 - DNA, 361 bp, Pseudomonas aeruginosa
  marker
cacgcgcactccttcgggcagggacccggtcataccggggatgcacctaaggtagccaatccgcagggggacgcgggtaatagacggttactacacgcgtgccgggttcagatgccgatcttgtccagggcccgcccgacgccttcccagaacgagcgctgcacgcgtttccggtagccgctggcggcgaactgcatgggctcctggacctggtgggtagcgccgatttccgcagcgccgagatcggccgccaccaattgcagcgggccatcgccctcacccgccgggtgctcgctcttcggtggcgggttgagttcgtcgtagcgcaggtagtagaccgagccggccctggcctcgagca

SEQ ID NO: 700 - DNA, 359 bp, Pseudomonas aeruginosa
  marker
cctctacgcccggctctacggacatctgcaacagatgtgaggcgccaggctgtcgcctggcggtttttctcgtatattccatataagacatccggtttttattggctgcggcaataaaaaacgctgtctgttccgccaggtgcagggcaggttcggcaaacagccactagactcctactgtttgccgggtgtccgcctcctccagcgtcgtggctgccggcaaggcaaggcctcgggagttctgcgacgggatcttgagcggccgacaggtgatgcagtcaggggtgacggagacgagcacccgatcgcttagcgccagtttgaatggtagatggaatgaggcagaaccggactctcga

SEQ ID NO: 701 - DNA, 357 bp, Pseudomonas aeruginosa
  marker
gcgcttgtcaccggcccggccagccatagcagcagggggttgagcaagaggaaggcgagcaccgtcagcttgtaccagcgcggcgaatgcccgaggaagttctgtgcgaaagcctggctcaggggactgctcacgatggactccacggcaaggaaaagactgaaaatgccagcaggactttcgttggatcaagcgtttagcgcaatcatcgaagagattgcggtatcaatgggcgtgccgtgcatcacatagtgcagcatcgacatttggctcgcccttgttatagttgcgggattttccgcacaacaaaaaatctctgcgttctgacagcgcagttgctctgccgaggactatcgc

SEQ ID NO: 702 - DNA, 352 bp, Pseudomonas aeruginosa
  marker
cctgaagattatcgagctgtgggccgagcgcctgggcgcccagggcgcggcccacgatgcgctgacctaccgggtgctgatctgggcgatggaggcggcttcgctggagctgctcaatgccagcgacccgctggagctgccgcgggtcaagcgggtgctcggcgacctgctggtgggtacgctctgtccccgcacccaggctccgacgagattgcaagggtaacagccgggcagtcgccgctcgcgcctacagaacctaggttgggctcgcagtccgtcgtggccatgctctgatgccctgtcataacaacaagacgggagacgtgcgtccatgtccgcgacaccctatctg

SEQ ID NO: 703 - DNA, 345 bp, Pseudomonas aeruginosa
  marker
aatcgttcgatgggaacgcggcgacctgcttgtcgcggcgaatacaaaatgctcatgggcagatgaaagcgcctcccaatgacagttgaatgtcattcggatggatttaataaacttttgattttcaacgacttacaggacaaatagagagcgtccagaaatcctctcggattttggcgaagcggctattaggccgggcaggaaaggccggcgccgaagcgcgggcagtcacgcgggctttcttggaagtcgtttgtgactggtcagtcacaacgtgagcgtcagttaagcagccggcgtgccgggctgcaagccctgtttcgcttttggatgggggaagggggg

SEQ ID NO: 704 - DNA, 336 bp, Pseudomonas aeruginosa
  marker
tggcgcgctaccaggcggagctgcagcagatggaagcgcagctggcccgcgccaacgcgatggtgctgaacaacagccagccggcgagcgaggagcccagcgaactcaacgagggattgaaggccctcgatgcagacgacctgtggaagaagaagaacgtctacgactgattccggcctgcctacggcagccgtgctataacccaggctcatatcgaccgaggaaatcgttatgagcctgacactctacggagccccgctgtctccgttcgtccgcaaggtccgcctgctcctggccgaaaagggcctcgactaccagttggaagcgatcgccccg

SEQ ID NO: 705 - DNA, 332 bp, Pseudomonas aeruginosa
  marker
gcagcgcctgcgacgagcagtatccggggccggctttcccatgggagccggccctttcatttttgccgcgatgagtaccctgccaacgatgggtcttgttgcagttcgtcgagaaagcgtgccatctaacggattaatccaaaagtctgtgttaggtttttcggcacgcccagatggccttgtgccttacttccggattgtccgactcatggaagacggatttcggaatattcctgcttacccgctgtagccgctgggccaacatcgcgcctttctgtatttcaaggaatgaaatcgtggctctccatcgcctggcctttatcttcctgtgc

SEQ ID NO: 706 - DNA, 332 bp, Pseudomonas aeruginosa
  marker
cagcgacgaggccggctaccggcgcgggcagtcggtacgcggcggggtgccggtgtgctggccgtggttcggtccgctggagcgcaacccgcaggaagtccgcggccaggtggaagatggcctgaaggcgcccgcccacgggctggtccgggcagtcgactgggaaatcgacgacatcgccgaggaggacggcgacctctgcgtcagcttccgcctcgacgcccccgatggcctccccggctggccgcacccggcggcgctgcgcatgctgttccgcttcggcgagcgcctgaccctgcgactcaccagcgagaacctcggcagcaagccgc

SEQ ID NO: 707 - DNA, 331 bp, Pseudomonas aeruginosa
  marker
cccgccgctgaggctcgccgggttgtccaggcgatggttgccgtacttcagggtgacgtcgaaaccgaacggcgggttgaccccgaggtcggcgaacagggtggtgtcgttgcgccccgggtcgctgctcagggccgcgccgagccggctgccgaagatcgacaggccgccgtagagttcggctgcgtcgttggccggctgctccgggcggctgtagcggatcaggcccatttcgtagcccaggcggttgttcagcgggcgcttgaagccggcgtaggagtcgatctcggtgggcttgccggggtcgaggttggaggtccagttgccgatg

SEQ ID NO: 708 - DNA, 330 bp, Pseudomonas aeruginosa
  marker
gtgaagcggttctcctcgaggcgcatttcccaggcgatggcattcaggctttccaccagtccccggtagtgctgttcgctgtcgcgcagttcgcgctccaattgccgccggcgactcacctcgcggcgcaggcggcggttcatggccagcagtatggcgaccgagaccaggatcagcaggacgatgggaagaccgtaggtcgccatctcgcgccaggccggacgtcggtcgagcaggccgccgacccagggggcctggagtcgctcgatctcctcggcgctgaggtcggcgaggaccttgtcgacgatcccggcgaggatcggttgtccg

SEQ ID NO: 709 - DNA, 329 bp, Pseudomonas aeruginosa
  marker
gacctgccgaccctggagcgcctgttcgccagcgttccgaccctgctgctgagccattgcgaagacacgccgcggatcgaagccaacctggcgcgctggcgacaacgcttcggtgaacgtattccggcagccgcccacccgcgcattcgcgacgccgaggcttgctaccgttccaccgccctggcggtggaactggcgcaacgacatggcacgctgctgcatgtcctgcacttatccacagcgcgtgaactggccctgttcgaggacaagccgctgtgccagaaacgcatcaccgcggaagtctgcgtccaccatctgctgttcgacga

SEQ ID NO: 710 - DNA, 328 bp, Pseudomonas aeruginosa
  marker
cctggagcggaacggagcgaagcgcgggtgcggacatcaggtggataccgttctctggctgacatcgtcgacatgggcgaaatagcgcaagcctagccgatcggagacctgtccggcgcaggcggcgatgtcgcgcagcagtcgcgccagcccgacgagcacctcgtcgagtcctgccgcgccgaacagcgggctttccagggccgccagatcgaagctgcgcaggcgttcgcccagggtcctgagttcccgctcgcgtggcgcgccgaactcctcgtgcaggcgctccagcgaacgctccagggcctgcaactggaagcgcagcgag

SEQ ID NO: 711 - DNA, 327 bp, Pseudomonas aeruginosa
  marker
cttggcgaacagctcggcgcattcgtcgaaggattgcaccggaacgtgccagagcagttcctgttcgcgcagcggacgatgctgcgccagccactcgccgtcgacctggcggaacgccaggcgcagggcatcatgctgttcgaccaggcgttgcagggacttgcgcagcagaccgaggtcaatggcctgccgcggctgcaacagcagcgactggttccagtgttcgcggcgcgccagcggcaggtcgaagaaccagtgctggatcggcgtcagcgcgctgtcgccctgcaccggcccctgctcggcctggctggcctggctgtgccg

SEQ ID NO: 712 - DNA, 323 bp, Pseudomonas aeruginosa
  marker
cgaccttcgcgccttccagaccgagtacccgaacggccaggccagcgcgctgatccgctacgacgcgcgcctggtgcgtaccgacgacaagcgcgtggtcgccagccggcgtttcgaggtcagccagccggtggatggcaagaaggtcgcggcggtggtcagcgccttcggcaaggccggcgatacgctgtcggcccaggttctcgactggaccctacgccaggcctcggcgcaacccgccgtgcagccctgaagcgtcccgcctggcctggcgactagcccgggcgctcctggcggcgcgcccggtattcgttgggcgtgca

SEQ ID NO: 713 - DNA, 319 bp, Pseudomonas aeruginosa
  marker
cagttcctgggtctccaccaggtgggtgatgtcgcggatcaccaccaccagcgccggggtctggtcgagggccacgtgctgggcgctgagcagcgcgctgaaggtactgccattgcggcgccgcaggggcacctcgaggttggtcaggttgccgtggccgagcttttccaggacctgcgggcccaggccggggagtgcccagatgcccagttcggtggcggtcttgccgatggcgtcgtcggcggcgatgccgatctgctgctcgaaggtgctgttcaccgcgaggaagcggccgtcggcgccgttggccagtaccacc

SEQ ID NO: 714 - DNA, 318 bp, Pseudomonas aeruginosa
  marker
gaatgcgcgcaacggcctccacgagaagctcgcggcccacggcgtgccagtgctcgatgcgcgtcccagcgaactcgggccggagctgatcagccgctacctgggctggaagcgcgccggcgtgctttgacggatcagaccgactgcggctggcgggggaagctgaagtagcggcgcagcgcctccaccagttcgaggaattcggcgggcggcgccagcagatggaagccggaatcgaaatgaccgggcgtgacgtcctcgcaggtccaccggcagtcggcggaaaaatcgatgcattgcgggcgaccgcccagtccc

SEQ ID NO: 715 - DNA, 318 bp, Pseudomonas aeruginosa
  marker
gtcgcgccaaggtgtacttcgactatctgcgcgaagccctggtgccgaccaacccgcaggtcgacgaacgcctcgcgcaactcgccgcgcaactgggcagccagcaggcggcgctgggcaaactcagcgagatcacccaccagcaggcgatgatcatggcctacaacgatgctttccatgtcatcggcatggtgctcgcagtgagcatgctcgcggtgctgctgacccgctcgctgccggccggcatcggcacccgcgccgacgccggggctcactgaggttcagacgttgaccaggcgctcgcgcagcgtctggatc

SEQ ID NO: 716 - DNA, 318 bp, Pseudomonas aeruginosa
  marker
cgccgcgacctcgatctcgctctgcagatggcggcggatgtaggcatcgaggcgggcgaagacgacctgcgcatcgccggggtcctcgcggctgacgttggtcttcagcagggtcagcagcttgctgccgaggatctgctcgaagtggctgtcgacccgcgccagccgctcgccggactcggcctcgcggcagaccagggcgagcaggccgacgaagccttccagctggtccaggcgatagcgatgttcgaggaaacgcacgccgcgcgccggatggctccagcgctgctcggcgcagatcgcttcgagcagcgcgca

SEQ ID NO: 717 - DNA, 314 bp, Pseudomonas aeruginosa
  marker
cccacggtcgcttcggccaacccgagcacgctactgcatatcacccttaccggctggaaaaccgcgcagaccgcaacccactcgcgggtctacaccatgcccggcttcgcccagctggaagaccgcgaaatcgccgagatcctcagcttcgtccgcagcagttggggcaaccagggttcgtcgatcgatgccggccaggtgaagaaactgcgccagcggatcgaggccggcaacggcccggccacgaccttcgtctctccacgcctggcggacatgctcgcggcgccgaacgccgaacaggtggtacgcggcat

SEQ ID NO: 718 - DNA, 313 bp, Pseudomonas aeruginosa
  marker
ggccgcgcgcgaatccgccgttcggcccgcgacaggtcgagcatcacctgtgcgcaatcgcctttgtcgtaggcgcggtaggccccgttcaggtcgctgttcagcgaccagctgttacaaccggtggcactcagcgccaggcaggcaacgatcaagcttcgcataggcatatcctccgttgggaactgtatcggcgcgtattggcgtgactgaagggcctgactagactgggatgcccctcgccctggcgccaaggagatgccatgcgcttcgcccgccgtctcgtcctgctcccgttgctgtcgctgctggc

SEQ ID NO: 719 - DNA, 311 bp, Pseudomonas aeruginosa
  marker
ctcgatgaggtacgcacctcggtactcgcgtatttcgccaagggcctgccggcacggccgcgctgccgccgcgccgaggattacctgcggcggctgggcgacctcgataccgccgagcaaccggatgccgccggcgtgcgccggctgtaccaggggctgggccaaggagatgcaacatgagccaaccgttcgcttcccgtggcctggcctggttccaggcgctggccggtagcctcgcgccgcgtcccggcgatcctgcttcgttgcgcgtcgccgatgccgagctggacggctacccggtgcgtttcctg

SEQ ID NO: 720 - DNA, 310 bp, Pseudomonas aeruginosa
  marker
ggccatcacctgggccagggccgaggaactggcgagcagggcacaggtgagcacgagcaggtgcttgagcatggttctacccctggtaatgcggacaacggcgctgcgccggtcttcccgcacgacgccaacggcaaggccgcggcatggggccgggcgaggtcgggcaggtcggaagggcaggaagagcggcgagctagagcgccacggaccatcttaaccaaggttcgggcggctgaccgaccgctcgtcagggccggccgatcaattgttaccgcaggctttccgcgaggctggccaggcgaatcac

SEQ ID NO: 721 - DNA, 307 bp, Pseudomonas aeruginosa
  marker
gtcgatgtcgctaagcagaagtcattggcgcatagtattgcttattttcccgtcgtgccggcgtccgtcgccgcgaaggggaagacgctggaggtacgcatgaacgaaccgcaagccttcgcccagaccgatgccgagtggctggcatcgatcaaccgggcgcgcgactggttccagggcccgctgggcagcctgatgctggccgaggagcgacgcctgttgtgcgacgagctgacccgttacttcggtggctacctggtgcactacgggccgcatgccgaactgccgccgagcaccgggcagattc

SEQ ID NO: 722 - DNA, 306 bp, Pseudomonas aeruginosa
  marker
cggtcgcgatacctgccagaccagcacgcctacgccgagcagcgccgccacgatcaaggcacggctcagccaccgtttgctttcctgtttcatcccttctcctcgcacgtccggccaggccgcggcgatggcgctacacgctggaaagcgcggccgccgcggacttcactggctcgattgtccctccagggcggcgcgcgggtgttgatgcacgtcagacgcgcccgaccgaatctcacaggaaagcagaatcgccggtgcctcgcatccgggagcgcgggacagaacggatagttgacctcaggg

SEQ ID NO: 723 - DNA, 304 bp, Pseudomonas aeruginosa
  marker
gccgtcggccattaccaggtgaccctgaaagtagggttccgtatcgccaatagctgatggcaccctggaaacctgtccacgatcgcctgcgccctggaaaggccgccgtgtctttccgcttcgccggatcatgcacaggctatgagggcggcgtgcctccatgggcggcgcgctcgtctcaaccttgccgcatttggcaagcctgacccgttcgggtcttcatccatgcaacgagggaatgtgttcatgaagaagttgatgttggcagtcggcctgtttgccgtggcgggcagcgcattcgccg

SEQ ID NO: 724 - DNA, 301 bp, Pseudomonas aeruginosa
  marker
gtcctgcaaggcctggtagtcgaggcccagctcggcgaacagctggcgtccgtcgaggccttccagctccagggcgaggacgatgccctggacccagctggacaaggttgtacgttccggcatcggtctcttcttgttctggcgggaggcacgccgaccgtcgtccggcctggcggcccaaggatactaaactggccctgtatgtcatccgcgacatcgtgcggcccgcactacactgcgcggacacaacgagaggaggcattccatgagcagccctgatgacgagcgtttccacagtttc

SEQ ID NO: 725 - DNA, 297 bp, Pseudomonas aeruginosa
  marker
ccagcccgatgctggagggcaaggacgggaagatcccggtgatcgtcgccacgccctcgccgctgacccagttactgagcaacggcgaagacctgatgggcaacatcaaccagctcatcgcgcgcttcagcaacctgctctccgaggaaaacacagcgcgcatcagccgcaccctcgaccatctcgaccaggccaccggcgcgctctccgccgagcgcgagaacgtcagcgcggtgatgcagcagttggcccaggcgagcaggcaggccaacgccgccctggcccaggccagcgagt

SEQ ID NO: 726 - DNA, 295 bp, Pseudomonas aeruginosa
  marker
ggtcggaaccttcatggaccaccgcgagccggccgaccagccgctcgaggttcagtacgcgccgcgccatgccatgcatgtgcagccgggcggagtgctcgccggtatcggcttgccgagcgagttccaggtcaattccatccatggccagggcgttgatcgtctggcgccgggccttcgagtagaagcactggcgcctgacgggttggtcgaagccatctccgtagaaggtgcaaaagccttcgctcttggtgtgcaatggcacccggagtggcaggttctgacgaaccccaac

SEQ ID NO: 727 - DNA, 295 bp, Pseudomonas aeruginosa
  marker
tgcccagctccatctccgagccgaactgaccgagggtcagtttcgccaggtattccgggtcctggtactgcgactcccagaccaggaaattggcgtggtagccctcggcgcttttcagcccacgcagccactcgctgtattcgtcgtcgtccaccgcgacccaggccggcggcacggaacagccgtcaggattgtcgaagtagcggatgaagccgggacgatcgtgggccagcggtacgcccggcagcggcaggcgccgccaggacggcaggtcctgcatggagcgcgcggtatg

SEQ ID NO: 728 - DNA, 295 bp, Pseudomonas aeruginosa
  marker
ctcaagctcagcggtttcccgcaggtcgagctggtggcacgggtatcccgcgccggcaacgccatctccggcgagtggatcggacgcggcaaaccgttgtctactgcccagtcgtcggcgcaagcgctgaccatcgacggcccggaccagccccaggcggcccggccataacgacaatcggttgaagggaggtgcggcggtgaaggcgaagtatctgggtctggcgattctcctgggcggtctcggcgggtgcgtggtgcatccgccgcagaccagcgaaccgccggcctcgctg

SEQ ID NO: 729 - DNA, 293 bp, Pseudomonas aeruginosa
  marker
tggaaccctggcgccgggccaggcgtccacgaaaatcaaacagactgtcgacaaccgccaaaagacagatcaggttccccagcagcaatacagccaggtacaggcccaccagccaaccacccgcgaggcgcttcagggcgatcaggccatgcccgagcgccacgccggcgatgatcagcggcacgctgcacaacggaccgagcaccgcggcctgcacttccagcgccgggaccacgacggcccccagcagcaggatcacggcaaccgccggcgccagccgcaaactccggaat

SEQ ID NO: 730 - DNA, 293 bp, Pseudomonas aeruginosa
  marker
cggccgcgacgaacagggcaacctgattcgcaaggccggggtgatggcgatcgtcctggaagacggcgaggttcgccccggcgacgccatcgatatccagctgccccccttgccgcaccgggccctggagaaggtctgaggcaatccgccgcgattccgggcgaactctgcgcgagggcctgcgttccaatgttggcaagcaccgctcaaccacaaggagtcacagcatgtacaagcagtcactggcggcactgttcgtgatggcaaccctggccggctgcgcgtcgaccaag

SEQ ID NO: 731 - DNA, 291 bp, Pseudomonas aeruginosa
  marker
gccgacgccggccttgccgtcgcgccagaccggtgcctgggacaactgcgccaggcgttgcgccacgtaggcctgcgggcgctcgcgcaagcgctcgccgagggatgccaggccggcactgtcgagggcgtggccgaacagaggttcgcagcgctggccgggaaaggccggcttgatcaccaggtcgggcagtgccgcgagtatcgcctcgagggcttgcggctcgccgcaccagcgggtgtcgagcgagggcagcgccagttcctcgccaagcaggcggcgacaggcctg

SEQ ID NO: 732 - DNA, 291 bp, Pseudomonas aeruginosa
  marker
gatcaaggagctccacgcaatgaagcgactggctggactgaccgccctcgccctggttatcggcaacacttccggctgcggctggctgtgggggccggagggctatttccgcgaccgcggtgacgactacctcggcgcccgcgaaacgcctcccatgcaattgcccgaaggggtgcacagcaagccgctcgatccgctgctgccgattccgctgaacgtcgccaccacccacgaaaaagagggtgagtacgaggttccgcgtccgcagccgctggccaacgccggcgacat

SEQ ID NO: 733 - DNA, 289 bp, Pseudomonas aeruginosa
  marker
gttttcatacggactccatgagcggcttgtggccgcggggtctttgttgttgtcgttgccttatcgataccgcgtcgggacggtccgtgcagccccggatagggaccgggcaacggggaggaatcggcgttttcgtaaagttttccttacgaattggcctgggtcgcctgttcattgggtcaggcattgttgctggtgagtctaactgtcacatattcttgacggaaatttccggccgggagttaaaaaaaccggccgcgagcccatcagaacgacaacaccgggccac

SEQ ID NO: 734 - DNA, 288 bp, Pseudomonas aeruginosa
  marker
agcagacgctcgccgcggcgggcgaacaggtcgcgcgacggctggtgcaggtgcgggggaatgttggcggcggcttcgatctgccccggctgaagaatggtgcgtgacacgggaactcctcgggtctgcgccggcgggccggtgggccgcgccgcaacgatcgggcgcccggtggggcgcggaatgaatgcaaaggccccatcgctggggcctccggtcgggcgatggcgacactatacgcgtcagtgctcctcgcccttgccgacttccttcagccagccgttatgg

SEQ ID NO: 735 - DNA, 287 bp, Pseudomonas aeruginosa
  marker
cgacggcctgctcgaacaggggctgctttgccggcccattggcgagagctgcctgtcgcgatacgggtactatgcggtattgccggagcgcaagcggcgccagcggctggtcgacggtttcgtcgactggctacaggccgagttgcaggccggcggcgcttgaagaggtgacgatgaacgagtattccaccccccgcatccagggcttccatgctcacgtctatttcgatgcgcagagcatcgagcgagcccgcgccctttgcgaagaggcggcgcggcgctttccg

SEQ ID NO: 736 - DNA, 284 bp, Pseudomonas aeruginosa
  marker
gccggcggaacggctgtcgtagaactccttgccgacgccgaaggcgagcgagaagctcaggccgaagcgtgcctggcgagcgccgcgcaggccgcggtcgtgggccatctgcatgcccgccgcggcaagggccgcggaactggcgaaatgcagggccttgtcttcgcccagccagtcgtcttcggcgaaatggctgcaaccgccgagcaacaggcaggccgcgaccagcagtgcgcgcatggatcctctcccgtatcggttgcgcggcagtttagcccagctca

SEQ ID NO: 737 - DNA, 283 bp, Pseudomonas aeruginosa
  marker
cttgccctggggcagcgggcagttcatccggtaggtgccgttctccagcttgacgctggtgatcgagcagaacggcgcgggttccaggtcgctccaggccagcggcttctcggggttatagccgtccttggtgatgtagaagtcgaagtagcgggtcgcgtgcggcgcgctggccttgtagacgaactggaagttgccgctggcgtccggcgcgatggcagtgctgggccagtcgctgcgagccaggttcaggcccttgaacagtgccttgccggcgccgcag

SEQ ID NO: 738 - DNA, 280 bp, Pseudomonas aeruginosa
  marker
ctgggtaatcgcggcgaagctgggcaggctcacggccaggccgaggatcaggaaggagaggcgacgcatcaggcgtgtgtccgggtccttggctatttttgacaacgaatcgtcaggcaacagtaacaccttgcccgcacaggaaaaaagagggagcgcgggcctgtccggcctagaaggtccggggttctggccgcgcttgcgaaaacgccacgccggcaggagcgggcgtggcgtttacgggacggcctgcaatgggctgtcagcggctcgcggtgtc

SEQ ID NO: 739 - DNA, 279 bp, Pseudomonas aeruginosa
  marker
agcgggtcctggccggggtggaagcctgtcgggcgagttgctggtagaccggcttgacggcgccgccggcgatctgcccggggatgctcagttgctggcccttgcgcaggtggttgctggacaggcggttggcgctcttgagctccgctacggtgatccgatagcggttggcgatgctgtgcaggctgtcgccgctacgcacccggtattgctgccaggcggtgacttccttcggcttgagggtgtccagcgaggcggtcaggaacgccgctttctcca

SEQ ID NO: 740 - DNA, 276 bp, Pseudomonas aeruginosa
  marker
gagcagcagctcggagaggttttcccttttgctgacgaagcccatggcgccggcctgcaggcagcgcggggcgaactgcgccggattctgccgggtcaggaccaggaccttggtgtccagcttcagggacttcaggcgggctatcacttcgagaccgtcgatcttggggatgccgatgtccaggatggccaggtcgggagacttcttgcgggctacctgcagggcttcggcaccgttgtcggcctcgccgacgatggtgaaaccgtcgcgctcgaa

SEQ ID NO: 741 - DNA, 275 bp, Pseudomonas aeruginosa
  marker
tggtgcagctcaccgcctgtgcccgcgatgcgctgcgcgcctgcggcctgcaaaggatgctgctgctggtggccgatcgcacccaggtacacgtgctggcgcagcagagcgccggactcgaaccgggccaggagaaattgcaactggagattgccagcagcccgctgctgaagaaactgttccagcaacccgccctgctgcgcatcggcccgaacaaccaggaccagttgctgccggccctcggcgaacccttgcgccaactgttccccgggcct

SEQ ID NO: 742 - DNA, 275 bp, Pseudomonas aeruginosa
  marker
agatcagcaggattcgttttccttataaaccgcccgcggccacactcgccagcacttttccgatccacccgacgcggaccgaccatggctggcgaaacctcgctgcgcaccctgctgcgcacgctcactcccgaactcaatcccggcgactatgtgttctgtacctgcgccgctggcgcgctgccgaacggcgccgagccgctcgccagcttccgcgagcgcgagggcctgaccctggtgctcgaacgccggcaggccgaacgcctgggcctgcc

SEQ ID NO: 743 - DNA, 273 bp, Pseudomonas aeruginosa
  marker
gacccataccgcgcggctggccacccgggccggtcgctcccccgggacgaccgtcggtcccggatcggcgcgcatttcctgaactatcgatcagctgtcactggccgccgcgcaaacgcttggttaagattccgccagcaacctggccacccgccattccccaggcggaaagctcacgaggccgagccgggacgaaaatacacagggatcctctccagcgcatgaagcctaccctccccgaccgctcgccgacgagccggtccgtcgcgtcca

SEQ ID NO: 744 - DNA, 273 bp, Pseudomonas aeruginosa
  marker
ctcaacgacctgcagagtgcccagccggtaccggcgttcgggactacggcgttcgtcgctgcctgaaaaatattttttatccctctttcagaagaaccgggcctggcgcccggtttttttatgccttcaattcaatgacttagcggcagaacgcggaaagaaaacattcgtattcatattctttttcccttatatttcaataacttaggtttgacaccctgcttcgtcgcggccaaacttggcgaatcacacccactacgacggcaggattcg

SEQ ID NO: 745 - DNA, 267 bp, Pseudomonas aeruginosa
  marker
aacaacattgcacggctcgccgaggtgctcgaaccctggagccagctgctgtcgatacagagcgcgacgctgcccggctcgctgttcatcgccgtgccgcagatcgacggcccgccgcgctaccgttcgctgtacccggagacccaactggccagtgccctgggcatcgacacccagccgctggtcgagctgatccgcgaatacctgctgcagcccgaggccgaacgcgcgaaagcacgcctgccgctgatcgaaggggtgaccctg

SEQ ID NO: 746 - DNA, 265 bp, Pseudomonas aeruginosa
  marker
gatccgtcgcagatcgatgagttgatcaccctggcgcgcaagtgcctcgatcagaccgccgccgccgtcctggcttgagtccctgagcggacttttgccagactgcgccagtgcgttggccaggctcaccgggtggtgacgcgatcggttgcgccaccgcccggatacttcaacaaaaatggagctaccccgcatgatgaaacgtttcggtaagaccctgctcgccctgaccttggcgggctctgtggccggtatggcgcaggct

SEQ ID NO: 747 - DNA, 265 bp, Pseudomonas aeruginosa
  marker
ctttgtcgttgtgggtgccgaacctgccgcgccgttgacggaacagtgaggtcgtcgtgtgtgcgttgtgcaatcgggccgcggcgcgcgtgcgctggcggcggacggatcagatgctccagcgggcgttcaccaggcgctcgttgagcaactgcgggtcgatcggctgcggccgtcgcgagagggccaggtggaaggtttccagggcgttttccaggcgctgctcgaggaccggttccaggcgcgccgggtcgctctcggtggc

SEQ ID NO: 748 - DNA, 263 bp, Pseudomonas aeruginosa
  marker
gaacaacgccgaggccctgctccgcgaatggctggcgagcaacgcggcgcgcctgggtccggtacccatcgagcacctgtgggcgatccgcacccgcctgctggatcgcgagccgatgctgcgccaccgtctcagcgagctgcgccggcgcatcctgttccatgccctgctcgacgccggttatccacaggcggaggcggaaagcctggccgaggccggtttccaggtattcctcgaagcgcgccaccgggtcaccctgtttc

SEQ ID NO: 749 - DNA, 262 bp, Pseudomonas aeruginosa
  marker
actctctccccaccattaccgtcgccagttcatgcagaaggaaagctgagccggacatcgccgggcctgcccgaacggcatcggcgccggcgctttccctacagaacctaggataggtagccaggtcggccttcgcgggttctcatgaatcacgcaggcccgccgcagacgcgggcgttccgaacaacgacaagaacggacctttgccatgcgcctttatctgctcgccttcctggccctcttcggtatgaatgctatggcc

SEQ ID NO: 750 - DNA, 261 bp, Pseudomonas aeruginosa
  marker
atccagcgaggcgcgatagacctcggtggcgccgaggccgagcccggactccacttcccactgcgcctccggcttgagccggacgcgccgtgcgggatcggcgtaaagctcgccaagcgagccctgcaccagccactggcgatggaccagccaggtgcgccacaggcgctccaggggatagtccggcaggcacgcctcgacgtcgcagcccagctcggcgaaatcgcccagcgcggcttcgcaaagctccagcacgccctc

SEQ ID NO: 751 - DNA, 261 bp, Pseudomonas aeruginosa
  marker
accttctttgaatgcgttggctatttgggtgaggcgctattcaaggcttcggcagagtcggcggacaataagacgtttctgaaagtgaccgtgaatttttcctcacggttctggcagcgtgcaacgcaaggccaggcgcagcgggaattgcctgcgcctggcgaatgccgctgtcagggtctgtcagcgtgcgttgcgcacgccttcggccagctcgccgcacagggcgaggacatccttgaccgcctgggcattgtcgcg

SEQ ID NO: 752 - DNA, 260 bp, Pseudomonas aeruginosa
  marker
acgacagcgagctaccgccggaacagttgcgccagcgcctggatcgcgaaatcggcgacatgcaacgactgctggaagacaccctcgacctcgcctggatggacaccgagcgcccgcaactgcccaccgagccggtgctggcgctgtcggtgtgggaagcgctgcgcgatgacgcctgtttcgaaagcggctgggacccggcgcggctaccctgccgcttgggcgtcgactgtcgcgtcgaggtacacctggacagcctg

SEQ ID NO: 753 - DNA, 258 bp, Pseudomonas aeruginosa
  marker
catcgactaccacgcctacgtcggcggcaacaacaccgacttcccggaaatcctcaactggccggtggccgagggcagctacttcaccgagcgcgacgaagacgccgccaccacggtcgcggtgatcggctacaaggtgcgcaagaagctgttcggcagcgccaacccgatcggccgctacatcctcatcgagaacgtgccgttccaggtcatcggcgtgctcgccgagaaaggctccagctccggcgacaaggatgc

SEQ ID NO: 754 - DNA, 257 bp, Pseudomonas aeruginosa
  marker
gggttcccttctcgtggtgccacggcggagccgcgggagccggtgcgcgcatcaggctgcgcaatgatggtgatcggcgataattggctaatctaatgtcctgtcccggccctcacaagccgccgccaggcgttatgggcaagcgtgttgccgctccatcacggtccctgatcgtcggcctggaggaatgccggacgaaaaaaaaaccggagccgcgagggactccggttttccttctggcatggcgccggaaacgg

SEQ ID NO: 755 - DNA, 256 bp, Pseudomonas aeruginosa
  marker
agaataaagaatatgcctgacgtacaaggcgatgatttttttgagttcttatggagagacctgccagggcccgggagctcagcggagagctccccccaaccgggcagatcaggaagtgtgccagtaaaccgcgtccagcttaacagacggaccatgaaggtcgatgtgattttgcgacgcagctatcaggactgtgatcccgtactgtccttgggccctgtgctaagctggcgccctttgccggcgggagtctgaa

SEQ ID NO: 756 - DNA, 255 bp, Pseudomonas aeruginosa
  marker
gttcggcgtgccctcttcggtgaccagggtgatgcgcgccgtggtcaggtcctgggcggcctgttcggcgccatcctcgctgctgccgtagccaccgccgaagtagttgacgtagaccaggtagggccccttctgcggcgtcggcgtggcgatgatttccgggccgtagccggtggtgacgtcgacatccagggtcgcgccgttggccagcgaacgattgccataccagacatggtcgccgtccggggtcaccag

SEQ ID NO: 757 - DNA, 241 bp, Pseudomonas aeruginosa
  marker
tctgcctgaactgaaggccgtgccgagcctgcagatcgacggcctgaccggtaccctgagcctgaatccgacccaacgtatcgaacgccagttgcaatgggccgagttccgcaatggccaggtccagccgctggggaccagcagcttttgaccgatagggaaagctcccgggacaaggggcgccaggccgaggaactggcctgcgcccatctacggcgacagggccttgccacacttggca

SEQ ID NO: 758 - DNA, 238 bp, Pseudomonas aeruginosa
  marker
agccaggctgcggtgccggcctcgccgacctgccgcggcgggagcaagcacgacataccctgagacggcgtccgtcgcggcggggtgcagagcctgcccctgctgcgctagactacgcacccagcgccggccttccgccggcgttgtcgtttccatggcgccagcggctggcgcaaaattttcgttccggtccgccctttacgcgggcgaccacctggaggctatatccccatgacat

SEQ ID NO: 759 - DNA, 237 bp, Pseudomonas aeruginosa
  marker
gtcagcggggtcggcagcggcaaggcgcaaccggattcggcgctccgccacgcaggctcggcagctggcacgcaagctgcagatactggcggtacgccggcgcccgcgccggcaaccgtcaattccccgtcgccttcgccatgagcgcgcgaaccatggtttgcgtacgggcgccggggccgaactggccattagcgcggccccaaccgggtagacccatgccaggaagagtagagc

SEQ ID NO: 760 - DNA, 236 bp, Pseudomonas aeruginosa
  marker
gagcgctcacgggcctgtctgcaatggctctactcagggactgaaaagccggtgtaagcttctgcaccatgacgacacagccgcaacccggccacgtgagcctggatagctccacccagcccgcccgcgtcagagccataggtgattggacgctcgcccactacacggctctggagcgcgaggtgacgcgcctgcgcagcgaagtggcgggcaacgccagcttcgacctgagccaa

SEQ ID NO: 761 - DNA, 235 bp, Pseudomonas aeruginosa
  marker
gagggccaggccgaggcagatcaacttgtgcatgcgggctccctttgcgtccggcgccaccttaaaccggccgcctgggagcaggcaaactcccgcgtcagtcgagcgcgtgctgcaactgactgacggtatcggccagggttcccaggtgccggcggcgcacccgttcgacgcaatcctggtcgcgcggccagtgcagcgccacgctgccgagcaggcgaccctgggcgcgtac

SEQ ID NO: 762 - DNA, 234 bp, Pseudomonas aeruginosa
  marker
cgcgccatggagcaccttttcctgctccagacgcgcgagcatgccgcccggcgtggagcccgaggaaacgtccagcaggcgctcctcggtcaattgcaggggctgctccagcgcccgctgctgctgccatgcagccaggccgacgcagaggccaacgaacaacaggccactctccagcagcaccagcagtttgcgcatcaaagtcagaaatccaggtcgtcgcgaagttggtct

SEQ ID NO: 763 - DNA, 233 bp, Pseudomonas aeruginosa
  marker
gccgtcaggccatcctcctcgccaaccaggccgccctcggcctgctcaggcaggacgacgtgcagggcgccagcctgggccgccacagcccgatgctgatgcactgcatgaagcaatggcgcctgaatcccagcctccgtccgccgacgctcaaggtggtgccggatggcccgacggtgcaacccagctttatcagcctcaaccgcgaagacgaccagcacgtgctgatcttc

SEQ ID NO: 764 - DNA, 227 bp, Pseudomonas aeruginosa
  marker
gtgatggtgcgttccgtgctatccgcggagccttatctgtatgtcgactggggcccggatttccgcagccagcacgatgccgcgctgccggaccgggccaaggccgcgctggcctgcaacctcggtccgctggccctgcagtacatcatgcagaacggcggcagcggttatttccgtacccgggtggtgagcagctacctggatggcggcaccctgcaacgggtcga

SEQ ID NO: 765 - DNA, 225 bp, Pseudomonas aeruginosa
  marker
tggttatcgaccgcgtgctggtgacctggtgggggcggctcaaccagcagaagttctggcaataggccggcgccgacagggacgaacacgctgtcttcagggttttcacgagaggaggtcgaaatggctgtattcaaggcgttgtgggtgacggaagcgccccacggcgtttacgaaacgcaggtggtcgagcgcgataccggcgacctgccggcgggcgacgta

SEQ ID NO: 766 - DNA, 225 bp, Pseudomonas aeruginosa
  marker
gcgatggcggcggcatcatactgcaagggtccgtcgatcaacaggtcggggcgctgctcgcgcgccaggcgggtggcctcgcgaaccttgtcgacatccaccccggaaccggagtcgccggtggagtagctgatcatcgcgacccgtgccgggatgccgaaagcctgcgccgacgcggcactctgcacggcgatctcggccaggtcactggccgaaggatcggga

SEQ ID NO: 767 - DNA, 223 bp, Pseudomonas aeruginosa
  marker
gatgctcgggtgctcggccagccaggcccgttcctcgggcgtgagcgtgagggcgccggccagccccggccagcagcaggccagacacaggagaagcacggcctgcagacgctgcatgaggcggtctcgcggtggacgggaatataagcggaagtgtagacgccgggcggcggggcaagcggcaaagaaaaacccccggtttttcaggccgggggttcgttcg

SEQ ID NO: 768 - DNA, 220 bp, Pseudomonas aeruginosa
  marker
gaccgtggtgctgtaagcgcgccctctacttcccaaccctcgctgaaggaagagggccagggagaggggcgcttcccacggcctcgcgtcccgagcaacaccgacagcccgccggctgccagcattctccggccctgtcgcgcaacagacgactttccagtgcaaagccgcgcggccgtggacgccgcgcatttgtacccacaacgacaaagaggaaacg

SEQ ID NO: 769 - DNA, 217 bp, Pseudomonas aeruginosa
  marker
ggcgaggcgtcggccggcaccgccacgctgtggctgaccgccgagggacagaacggcgcggtggaccgtggtgggcagggagtatttcacgaggcgacgccggatcgggggaggaagtgcgaccagcctaaacgtttcaccccggtcgcgatcttccctcgcctcaggcctgggcgcgctggccgaccaggctcagctcggcgactttctcgcgccg

SEQ ID NO: 770 - DNA, 216 bp, Pseudomonas aeruginosa
  marker
acgcgacgaggcgctaccggagccgtgggatagacaggggaattggtcgccatgcgttttctcgcgtgcgaaggaacccacccgtgccgctcggcggcacggagccagtcgggaggatcgagcggagcccaggccgggctccgcgccagggacttactgcgccgccgcctcgatggcggccgccagttgctgggcggccttctgcggatccgcggc

SEQ ID NO: 771 - DNA, 215 bp, Pseudomonas aeruginosa
  marker
ctgaacctccggcaacaaccgacgcggcccacgggccgcgtcgtcgttggcgctatccgggggaactgccggcgataaaatggatcggtgatactgctgccatccattcgcctcccggagaccgccatgaacaccgatagcccgatcaaccgcgtcgaacaggtacaggtcgacgacctggcctgctggcgcatccacaccgcccatggcgaggc

SEQ ID NO: 772 - DNA, 215 bp, Pseudomonas aeruginosa
  marker
aggcagcaccaccgtcacccagccggccgaccagcagaaaccggaagcgcagaaagaagagccgccgaaaccgggctccaccctggaacagctccagcgcgaagtggacgaagcccagccggtaccggttccgactcccgaacctctggaccccagcccgcaatgacggaactggcgttccacgaaaaagcccggcattcgccgggctttttcat

SEQ ID NO: 773 - DNA, 213 bp, Pseudomonas aeruginosa
  marker
gacgagccgatcgagctgccgggcatggcctgggcgccgttgcggcagttcatgctgcacggcgatttcgatcagttctgcatgctcggctatgccagccagatcggcatctgggcacgtcacaaccggttctgcggcaattgcggcacacgcatgcaggcgcaggaccacgagcgggtgatgcagtgtccgcagtgcgggctgcaccagtac

SEQ ID NO: 774 - DNA, 212 bp, Pseudomonas aeruginosa
  marker
cgcatggctgaatcctgattccagtgaagaatggtgatgaagcaacgccgattcgctgcctcgcggtatcgagacgtaccgttcatgggtccggggagcctgctccacctggcgaatgcgcctgcggcacaggcctgacgcattcggaaagacaggatgactgtttcagaacatccagaggttgctattatgccgtttcaaccgtgtcctga

SEQ ID NO: 775 - DNA, 212 bp, Pseudomonas aeruginosa
  marker
caggtcccgggcggagaagtccgtacgcgcgctcggcgccaggtcgcgggtgccatggagattggcccgcggcgactggtaggggcgcgggtagggagagcgcatcaggttgttgtagagcagcgcgcagccgatcagcaccagggtggagagcaggatcggccagaccacgtcgatgccgagttcgctcagggacgggttgagggccacgc

SEQ ID NO: 776 - DNA, 212 bp, Pseudomonas aeruginosa
  marker
cccgcctggatatcccgcggccgccgagcactgccatcgaccacctgccttccgaagccgaactgggcgaggaaagccggcggatgcgccacatgtaccagatcggcctgctcggcctgatccgcgaacagaacctctatcccagcctcaagctgatgggccgcgcgctggcgcgcctcgacagtctgcacggcggggtggcccgttcgcgg

SEQ ID NO: 777 - DNA, 212 bp, Pseudomonas aeruginosa
  marker
cttgaagtagcccatggcttcggggtactgcaccgccatccacttgtcgttgcggccctggttccagatcgcgtggaaggccgaccattcatggttctgcgaactcacccactgggcgctggtgaccttggtatcccagtgatagggggagaactcgtacttgtagttctggtaccagaccggcttgccgtcctggcgcttgagcgcgcgag

SEQ ID NO: 778 - DNA, 212 bp, Pseudomonas aeruginosa
  marker
gctggaactcctgcttcgtcagggtttcggacggtcgcgccgggtgggcgaaccctgggtaaaggccttcatccaagccttccccttgacggccgtcaagcgccggctacccatccagggtggtatgcttgcgccctcgtttcgtcgccagcccgcgccccgcgcggcctccccgctccaaggtgaactccgtgaccgaccgtatcgccgct

SEQ ID NO: 779 - DNA, 211 bp, Pseudomonas aeruginosa
  marker
aacgaggtcctgcagatccaggaagcgcccgaggcgcctcgcttcaaggccgacgtccaggacgcctgggccggcgccttcgatgcacagaaggtcaccgactggcagcccggcatgccgctggaggaaatcgagtaccgcccgcaccagtcgccccgcagtgtgcaacccgggcacccgcaggcccacgcacaggctgacgccaccgagg

SEQ ID NO: 780 - DNA, 211 bp, Pseudomonas aeruginosa
  marker
acagcggcccgcctcgatatcgatcacctctaccgccacattcttctcggccaggaccaggcggatgcgatggcagtaatgatcggcagggtcggaatagcaggtcagcttgttgattgaagccatggagccctcctcgcaggtcgacttgtgggaggtgaaaagacgcgcgcgccccgtagggcgcgcgcttcgaagaccaacgtgcggg

SEQ ID NO: 781 - DNA, 211 bp, Pseudomonas aeruginosa
  marker
cagtcgcgcagcgaacgcttgcggcaatggaccctcgacgccgccgcgcgactttccgcgcggctggactgaccaaaaaacaggagtttcgatgtaccccgcccccgacatgagcctctggcaaggccggatcgatagccaggaaggcgccgacgcgcggcgctggcaccaatggatgcgtccctacgcagacgacgccgaagcggccagc

SEQ ID NO: 782 - DNA, 209 bp, Pseudomonas aeruginosa
  marker
atggatgacgacgactgagcctcggcccacttaggcggataacgccaggacgttatccgtcctacgcgaccggtcaggcaatctccccctcttcggagcgaggcgcgtgacctgggatggggctgccggccctcgcgagcccatgaaaaagccccgccgaagcggggcatttttccaacgcgcgaagcacgctcttcttacagcttgct

SEQ ID NO: 783 - DNA, 208 bp, Pseudomonas aeruginosa
  marker
cggctgagacgacatccggtcatcataaaaggggcgcaaactctggcggaggcttgattggctctgcataatgcgccccttttttcgtgccgcgcgattccgtcgggcggccgttcagttcggaagattcttccgctctgatagacgtttcccgagccatcccggtcgggtgaccaatggcgccagccggcgcccgtgcaactcaaca

SEQ ID NO: 784 - DNA, 208 bp, Pseudomonas aeruginosa
  marker
cgggcgggtctgggacgacctcatggtggtcgcccccgggcgcagcgaaagctttggcgtgcagatctggagcgagccgctgaaacgaccctgagcgggtcggcgagcggaaaacggcgcggctcgcatcgtccgccatggaccgttgcgcaggtgccggccctacaggtccgcttcctccaccaccttcacccgcgccttgtcgatg

SEQ ID NO: 785 - DNA, 208 bp, Pseudomonas aeruginosa
  marker
ccccaccgggttgtggttgtggatgctggccttgatgaagcgcccgtcgcgcaatgccggcgactcgtagccggtggcccagtccttcgccgaatattcgaggttgacgtcgtactggccggccttgaaggcttccagggcgaccgacatgtcgcgataggagtcgatggtgatggtgtcgaagttatagagtccgcgggagaccgga

SEQ ID NO: 786 - DNA, 205 bp, Pseudomonas aeruginosa
  marker
ggcggggagataccgtgatgcatggtcgctcgcgggagaggatcggttggataacttggcatcgtgacgatgacgctttgattgcaggacgatgaaggccgcttcgcgggatagcccggcgatgctttccgttggaactgtcgggggcgtcttgccgtcgcctcgcgccgacgaactacgaggtgccgggaagtgctatttcatt

SEQ ID NO: 787 - DNA, 205 bp, Pseudomonas aeruginosa
  marker
tggctgcggccatcccattccttggcgaggatggtctgcatgcgctggtaggccttgcgcagtatgtcgatgtcgcgcatgccacgggtgtagcggtaggtatcggggaagaagcgcccttcggccacttcgtcgggcttgccgaggcgttgcatgatctcgccgtcgctcaggccggccagggtctgctccagcttgccctgcc

SEQ ID NO: 788 - DNA, 205 bp, Pseudomonas aeruginosa
  marker
tgaagcgcgagtcgagttggaacgtatccatgaaaaacctcgcagggagctgtgacgccaaggaaaatccggcgtcagaaatagctgaaagcatgcacctaaatgtcgccgcatgcatcaaggggtgtctataataaccccccgtttgcgcaaccctttgcgcccccgcataacgggttgcgttgccctcctctcttcacactcc

SEQ ID NO: 789 - DNA, 204 bp, Pseudomonas aeruginosa
  marker
gatcggcgttcattcgccgattgatggcctgggccgtccgccggcggaactgctaagctggtatagcgaaaggcgcctttgggcgcctttcgcgtcatgcgccatgcctgggctctttaccccgtaccctggggatgcgccgcagccagggttcttgcccggtgcggggcttggcacgttgtgtcgctgaatgcgcaaggagta

SEQ ID NO: 790 - DNA, 204 bp, Pseudomonas aeruginosa
  marker
gtgcgccgcgcaggtgttgcgcgggcaggaacgggaagattttttcggcgtcaccgggacggatatcagccttcacgccctgcagcgggcgcggcaggcgaactatccggcccgcaagctggagcaactggaggccgggctggtcgaacgctattgcgaacgccaggccgacggcagcttcagcgtgaaaacgatactgaccga

SEQ ID NO: 791 - DNA, 203 bp, Pseudomonas aeruginosa
  marker
gaagccctgtccacggaacagcagcaggtgaccgtagaacgcctgggcgtcgcggtgtccgaggttggccatgcgcgagaactgcccctgcatccactgccaggctcgcggctgcttgaccagccagggccagcccagcaactgccgggccacgccgtaaccgaggcgggcgcgcaggcgccagatccattcagagttcatcg

SEQ ID NO: 792 - DNA, 203 bp, Pseudomonas aeruginosa
  marker
tccaaggtctgattcccgcaagcaaaagcccgtcgcgagacgggcttttgtcatccagcgcatccaccccgccaggcccccgttgggtggcccctcgcagcgcggggttttcgtcgttcaggcggtgcgccaggtaatttcctcgacgcccccggcgtcgacccgcagccagcggtcggcgtcctcttcgccctggttttcct

SEQ ID NO: 793 - DNA, 200 bp, Pseudomonas aeruginosa
  marker
cactcatcactgggccgccagggcggtgctcgggatggacagggcctggccgactttcaggttgtcgctggacaggctgttgctgctacgcagcgcggccatgctcacttcatagcgctgggcgatcatcgccagggtctctccgggccgcaccacgtgctcgcgcggccccatggagagcttgccctgggcgcgcaaag

SEQ ID NO: 794 - DNA, 198 bp, Pseudomonas aeruginosa
  marker
gcgcttgatccgacgctccagttcctgatggatgctgtagaggttgtattcgctgtgctcgaacaggatcagcacgctaggcgaacaactcatgatctgccgacagagttccgaaccgatagaaccgcccgccccggtcaccatcaccacctgaccgcggatgcaccgttccagcagctccttgcgcggtgcgacgct

SEQ ID NO: 795 - DNA, 198 bp, Pseudomonas aeruginosa
  marker
tgccgtgctgcgtccgcagggccagccggacgtcctcgacctggccagcgccagcgtcaaggcgctcggactgccggtggccgcctaagatggccggcgagttccgctggcaggcaggtcggccggctaccgcccaggtcggcggctgggtgctcgcgcactgtcagcagcgcttcctccaggacgacaacggcctgc

SEQ ID NO: 796 - DNA, 197 bp, Pseudomonas aeruginosa
  marker
ctgctcctcggtgttctacgaccccaaaggggagcggcagaacgtggattgaccggagagggatgcgctcctctccccggccctcttcccgaagggagaaggcagacaggctaccagggcgcgcggcgccccaaggtgaaaacgaatgagcaaggcaaacgtctaccagcaacgccccgaacccggcgtccacgccg

SEQ ID NO: 797 - DNA, 196 bp, Pseudomonas aeruginosa
  marker
gaaagcgcgcctgaaagccgaactcaacgaccgggtccggcgctgcgcgcagatttccgagagccttcccggccagttcgtcagcccgtcgctgaagctgttgatgagccagatcgagctcagcctcagcgagcagcaactggcgctggagaagaaagccgatgccgggctcaaggctcgtatagaagagttgcgc

SEQ ID NO: 798 - DNA, 196 bp, Pseudomonas aeruginosa
  marker
aagactaagtcgccaggcaagcataaccgcttcgcaacggcgcctttcttgagcgatgggcggcgctggtcttaactggagagtgcctttcgatgtcttcgtcccagatacccacaagaaacagggggagtcatgagcgagccgagcaaaacccaggaaaaccgcgacagcgtggtcgacgcctgcgcggccttcg

SEQ ID NO: 799 - DNA, 193 bp, Pseudomonas aeruginosa
  marker
gttcccgcctcttctctttccggcatgacgacacctccaccgtcgacagaccgttatggcaaagcaagatgcaggcccaggtcatgtaggaagaatctgcgaatacagccagcattgctccgcggcctagtcgatgccccctggagcctcgagcatcgccggcggacggcggctgacccaacgggtcaggccc

SEQ ID NO: 800 - DNA, 193 bp, Pseudomonas aeruginosa
  marker
cagccgcgagatcgccatcgagggcctggaaggcgcgcgctacatcgagaccctggagaactgggaagaacgcactcagcacggcgcggtacgggtcaagggcgaactggatcgcatctacctcggtctcgaacgcgacctgctgatcaaggacccgcgctgggaacgcagcatccacctgcacgccctcgac

SEQ ID NO: 801 - DNA, 192 bp, Pseudomonas aeruginosa
  marker
cgctgcacctcgtcgcgcattagcagacaaccgcccacacgggcccccaggagatttcggcaaccttaacagaaagccatcccatgacctagcttggcgcaaaggcgtcataaatcaagcgtcatggaaacatcattcgacggcatcgaacgggcgctgcgaagtataccgccagcccccggcgagcggcag

SEQ ID NO: 802 - DNA, 192 bp, Pseudomonas aeruginosa
  marker
ttcatttttcatttccgactcctcgagagcgccgccgctgccgccgggtcgcggaggaccggcggcaacgcccgcgcgcaggctcaacgacgctcgtgcgggtcaaaggtgtgtaccgacggatcgacctggtgcaccggtgcctcggcttgcccgtggtcttcctcgtcgtccgcgcggttgggaccgacg

SEQ ID NO: 803 - DNA, 191 bp, Pseudomonas aeruginosa
  marker
accggttccgggcgcccagggcccggcgcagacccagccgcagtactgatcgcggcctggacgaaaaagcccgccattcggcgggctttttcatgggcgctggtcggcgctcttcgtcctacgccttggcgttaccgggaaactcgcggtgcaggctgtcgagcaactggtccttgcgctcccacagctgg

SEQ ID NO: 804 - DNA, 190 bp, Pseudomonas aeruginosa
  marker
tgatttgcgcggcggccagaacctcgccgacctggcaggccagcagaatcatcaccccagtcaacaacgtccgcagacgcaagccccaacccatcgtttttctcatgctcccatggtcagggtggcacaccaggcttcgccccgcgcaccgtgcggtaccaggcgcagtgtccgtccacccgcttgggca

SEQ ID NO: 805 - DNA, 189 bp, Pseudomonas aeruginosa
  marker
gaactggaagatcaggtcctcaagctcgtccaccctgaactgttccatgtcggcagttggtgctacctggtcttcaacatcctggtcgcgctgttcctgccgccgtcgcggcaattgctgccgatcttcatcctcgcgctcaccgacgtgctgatgctttgcggcctgttctacgcaggtggcggcgta

SEQ ID NO: 806 - DNA, 188 bp, Pseudomonas aeruginosa
  marker
aaccaatctcggcagcgtcgacctgaggctggacgaggaggtgctcgccggtatcgatgcgatccaccgggagcaaccgaacccggctccctgaggctccaggggcctggcggtgccggcgggttcggcggacaaccgcgcgatgcggtcgttcgcccctcccggtggccaggagcgcctcacagggc

SEQ ID NO: 807 - DNA, 188 bp, Pseudomonas aeruginosa
  marker
ggcgccggaaaaaatgggctgctcgggggtctgttgatccagggtaaactgctgttcgtcagccatgccactctccttcaaaaaataagctggcaaatacaaggcgaacgcataagttcgcaaaacgttgccggctatatggggacggctttaccacggttcaaggggcgagcggcaattgccagccg

SEQ ID NO: 808 - DNA, 187 bp, Pseudomonas aeruginosa
  marker
cgagcatccgcaggagcgccaggaactgagtgcgctgcgcgaggagctcagcactctggaccggggcgcccggcatgccgagctgccacaggtggaagaactctgccaggccttgctggcgctctacgatgccgtcgaggaaggccgcctggcggtcagcccggcgttcttcgaggaagcccgccag

SEQ ID NO: 809 - DNA, 186 bp, Pseudomonas aeruginosa
  marker
gtcctcaccggggccaagtcgatcggcgagatcagcgccgactcgctggtccgcgaactgggcgcctgagacgcccaccagaaaaagcctgaaaacgcccggggcgtgaccgtcgtcccagggccgaggaaagccgatgagcctgccgattccctttctcgagaccgtcgagcggctgataccgcg

SEQ ID NO: 810 - DNA, 186 bp, Pseudomonas aeruginosa
  marker
caggcgatgcaccgcaattgtgcactcgccgaagcggaccgccgctggctggaggctgccggagagcgcctggaactttccttgcgcgccttgcatcgcatactcaaggtggcccggacgctggccgacctggagcgcatcgatgccatcgaacgccggcacctggcggaagccctgcagtatcgg

SEQ ID NO: 811 - DNA, 184 bp, Pseudomonas aeruginosa
  marker
ctcagcgggtcgtcgacgaacggcgagttgggctcggtggacatcgctacatccctatgcaaggaaaaaggcgcctagcctagcgcgagtcgccggggatggcacggagcgtcatgtaaataaaacccatgaggcgagccccgacctgcggggcccgccgtcgcgcacgggctcagcgtacggc

SEQ ID NO: 812 - DNA, 183 bp, Pseudomonas aeruginosa
  marker
cgcgcaaaacgtactggaaaaactccaggagagcatgcgcaatgcggttcgcggttctgggcagcggaagccggggcaattcggccttggtgagcagttctgacacccggatactgatcgattgcggcttcccgctgcgtgaaatcatcaagcgtctggcgcgcctggggctgagccccgcgc

SEQ ID NO: 813 - DNA, 183 bp, Pseudomonas aeruginosa
  marker
ctggtgatctcgttcatagactcgacgcaagaaaaaggaacagcggaaaaaaacaacgggcacggtgccgttgccggtaccgtgcccgatgttagcggactgccgcggacacgcatatgcccgcccagccctaccgatcggatcgcttactcagcgacgatgatcagcttcagagtggtttcc

SEQ ID NO: 814 - DNA, 182 bp, Pseudomonas aeruginosa
  marker
tcggcggccagccgttcagcgacctgcatgcccaggccttcgccaagaccgcccagtgcaccgagcgcgcgatccagcagttcggccgccagcgccgcacggaatgagggacatgcccggcacactggtcgggcgcgctttccgttaaactgctgcccttcttcaacccgggggtactcgca

SEQ ID NO: 815 - DNA, 182 bp, Pseudomonas aeruginosa
  marker
ttcgaggtgaagcgttgcgcggtgctcatcggcgggtctccgacggtgtttttccgatcttggccggcgccggtgaaacgactgtgacaggccggcgaccgttgcgtgacagggcccggctgtctgtcgccggcgccagcgggtagactgggcgcctgcctccgggagcttcgccatgggtt

SEQ ID NO: 816 - DNA, 181 bp, Pseudomonas aeruginosa
  marker
gccgacctcgccgagctggagcccggcctgccgcgcgagcgccaggccctgctgaagaccgtcggccacgccctgcacgacttctgcgagccggagaaacccaagccgccaaccaccgccatcgaactgctggctcgcatcggttgtgccatggagaccttctggctgcacctcaaggcac

SEQ ID NO: 817 - DNA, 180 bp, Pseudomonas aeruginosa
  marker
cttacctcaacaggaacgtttcgacacggtaactcggcaaataatgaccggtattgtatcggaaagcctagcgcgacgctcggctttactctcgcgttccgtcgacccgctcaggccgcttccacctccaccggcaggccgttgagcgcggcgttacccgacagcaggtcgagatgacgc

SEQ ID NO: 818 - DNA, 180 bp, Pseudomonas aeruginosa
  marker
agaacaggcggaagcgccggcaaaaaagccgttgcggcgtgaagccgtggcggaggtgcattgatgagagtgtcgagcttcacatcgaacccgctgctgaccggggcagcacggatagcggcctctccctccagggagggggccgcaggatcgggtagccgcagccacaggaagcattcc

SEQ ID NO: 819 - DNA, 179 bp, Pseudomonas aeruginosa
  marker
cgacctcccgtttttccgccgcacaggcgcgcagcatggccggcgcgacgccgagcggcctgcgtgccatagcgcgggtattccaagatgaagacatatgacgaactcctgtttcgtgaaaaacagggctttttggatcgaaggggatcttgcgggcgcacagggtacgcccaggcagg

SEQ ID NO: 820 - DNA, 176 bp, Pseudomonas aeruginosa
  marker
aactgttccgcatcggcctggagcaggtcggcgcgcaacggccattgaacccgatccccggcagcgacgcgttgctggagcgtatcgaggcactgcaccaggaacgcatcgcctcgctcgaggccgagcgctacagcgatgccggcgagcgccgcgatccgttgctgatcgaggcg

SEQ ID NO: 821 - DNA, 175 bp, Pseudomonas aeruginosa
  marker
gcagcgcctgattctctccgccgaactttttctgcaacaggaggcgcgctgggccaaacgcccctgtcgcttcgatgtggtcaccgtcgataccagcgacggacaatcaccaccgcgactggactggattcagaacgcattcgacgcctgatcagccgccccaccgaaggtcatt

SEQ ID NO: 822 - DNA, 173 bp, Pseudomonas aeruginosa
  marker
agccctgctggcgcacctggaggacgaacggcgcgaggagctgtacctcgcccaggaactctccgccgagcgtatcgacaagctggagcaggaactccggctgatccgcgaacagggctacgccgtcagccagggcgagatcgacgaaggcgtctggggcatcagcgtaccgc

SEQ ID NO: 823 - DNA, 173 bp, Pseudomonas aeruginosa
  marker
gccgttccgccgcgggcggatcatcgatgtatcgcgcaaggccgccgaaggcctgggtatgatccgcagcggcgtggcgccggttcggatagagtcgctggattgagccaccttctacccacgacaggaaccttccgatgagcgaacaaggcaagaccggcctggagatccga

SEQ ID NO: 824 - DNA, 173 bp, Pseudomonas aeruginosa
  marker
gcagagacatcgccgagcgcgtccagtggctacaggacggtctgtcgggaattcccggggtacgcctgcacagcccgcggaacccgagccgacgcgcgggcatcctgaccttcagcctggacggccaggacaatcggacactcttcgaaacgcttcgccaggaacgggtcatt

SEQ ID NO: 825 - DNA, 172 bp, Pseudomonas aeruginosa
  marker
tagccggcctcgttgagcaccggcaggcagtgcaggccttcgtcggatagcagcgagaccagttcgacggcgtgggtgtcggcctgtacgcagaccaccggggtggtcatgatcgtcttcagcttggtcccgcgcaggaagcgcaggcgcttgaacgggctgccgtcggggc

SEQ ID NO: 826 - DNA, 171 bp, Pseudomonas aeruginosa
  marker
aaccgacagggtgcagaatccctgactcgaaaacccccgcctcggcgggggtttcgcgtttctgggggaaggaaatttcatacgacggtttccaggatggaagccggacccttcccctcttcctgtcagcgatggacctgcctgctatggatgagtcgcgatgaagaacca

SEQ ID NO: 827 - DNA, 171 bp, Pseudomonas aeruginosa
  marker
ctggcgccgtactgggcctgggactccgtgcgcgagaggctgcgggtgccgagcaggagcacgcggaagccgtcgcggttgtattgctcggccagcgccagcagggcccggcggcgttcctcgtcgagcggcaggtcgacaccgtcctggtgcacgcgggtggcgatctcg

SEQ ID NO: 828 - DNA, 169 bp, Pseudomonas aeruginosa
  marker
gcagatgaccaactggacgctggacaaggcccgcggcctgcccctggcgtcgctgttccggatcgtcgacgaaagctcgcgggaggagggcatgctgctgatcgagcagatcctcagcggcgagatcgacggcggtcgcgagcattccaagctggttctgcgtcacgac

SEQ ID NO: 829 - DNA, 167 bp, Pseudomonas aeruginosa
  marker
accctcaaccttagaagcccaggcttcgactcttcagccccgccggcccgcccggcggggtatcacgccatcagggaacgtagaagatctccggaccgtcgccgtcgtcttcctcatcatcgaaatcatcgtcatccaccgcaccggcgttcttcagacccgaacgc

SEQ ID NO: 830 - DNA, 167 bp, Pseudomonas aeruginosa
  marker
ggtaccctcgctgttattgtcggtcggccgccggggcagcggccggatcgagcgaggataaggcgaggcaatcgcgcgaggcaccgatcattcatccggcgtatgcgtcgccatcccctggagaggacggcgccgcattccggacaggcctcacttgtccttcttgt

SEQ ID NO: 831 - DNA, 167 bp, Pseudomonas aeruginosa
  marker
ctgtagcccgcgcctggtcgagggattgcagttgccgctggccaaggcgcacctggcgcgcctgccgatgctgcatctgaagccggcgcagcacgcccgctggttcgactggccggcgttgttcgaagcgttggccatcgatcggcagccgattccggcggtgctca

SEQ ID NO: 832 - DNA, 166 bp, Pseudomonas aeruginosa
  marker
aagggcatcggcgtggcggtcgaactccaggtagaactgcttcaggtagccctggcaactggggcaggtctcggcgcgcagcacggctttttccgccggctgcccgtcatgctccagggacaggtaggccaggtgcttgctttcctcgcagtggctgcacttgatc

SEQ ID NO: 833 - DNA, 166 bp, Pseudomonas aeruginosa
  marker
tgtcgatggcccgcgaggtgatgtcgttgatatcggcgctaccgcgcacgtcctcgaacacgtcgatggactgccccagcggcaggcgctcgacctgctcgttgaagctcaccgcacccgccaggcacggcaacgcaagaagaaagagaatcagccagtgccgcat

SEQ ID NO: 834 - DNA, 164 bp, Pseudomonas aeruginosa
  marker
cgggctagcttaccccagggacggaacggtcgtttcgatcatcgtcatcagccctgtcgatagcgactatcgtcgcaatcgatccccatatcgtcccacaccgatatatagttcgtcccaacccgatatggacggccaacggaccaccgccatgccactggaca

SEQ ID NO: 835 - DNA, 164 bp, Pseudomonas aeruginosa
  marker
cgtaccggccgtttgatgggttcgttcgcccaggagaccgccgacaagtacggcgtgacccgcgaggagatggacgcctatgccatcgaatcgctcaagcgcgcccaggccgccatcgccgatggctcgctggcggcggaaatcgtcccggtcaccgtcaccag

SEQ ID NO: 836 - DNA, 164 bp, Pseudomonas aeruginosa
  marker
gaggcactgtgatcccgatagccgggcgcgaagtgtgcccggccgaccttttcccggggcgaccgctccttccaagccttccccatgtgctttggtggccccgtttttattcgcgccgacgctgatgtcggcaggagtccgacgagatgcccgataccctccgc

SEQ ID NO: 837 - DNA, 163 bp, Pseudomonas aeruginosa
  marker
caccgactacttccagcgcgtggtccgcgagttccccggcacccacgccgccgagcatgcccaggcgcgcctgctggcaatgcgccagcgggccagggagccggtgcagaagagcgctcgcgaattgctcgccacctggaagccacagcagaacctcgatctc

SEQ ID NO: 838 - DNA, 162 bp, Pseudomonas aeruginosa
  marker
gaaacaccgaagggaggcgcaggcctcccttctttttgcccgccgccatgcctctcccagcgccaaacgccgcacagcctggaccttcccggctgggatcgagccggcggcttggctaaactgcagctttctccagcctccgagatcaccatgggccttttc

SEQ ID NO: 839 - DNA, 161 bp, Pseudomonas aeruginosa
  marker
ctgcacgatccgcgtgccgggcgcctggcgcaatggttgcgggagcagttggcaggctgagcgctggcgatttgctgcacttttccggctcggctagtgtccattgaacagaggcgcccgtcgggcgcgaagaaaaccaggcatcgtccggggagagagtt

SEQ ID NO: 840 - DNA, 160 bp, Pseudomonas aeruginosa
  marker
ggtcgaatgccgagcagcatgcccgcgacatcgccgaacgcctgctgcgagaactggcgaaaccggtggagttcgccaagcagtggctggtgatcacaccgagcatcggcgtcgccctgtttcccggcgacgccctgcagttcggcaaactctacaaggc

SEQ ID NO: 841 - DNA, 160 bp, Pseudomonas aeruginosa
  marker
gatcggcgcgtgatgcaaggtttccggaataccggtggcggaactgtagacgcccagggtgaaggcccagacgatcagtgccagcatcgcgtagtcgcggccgagactgcggaactccttgatgcccaggttgaagatgttggccaggctgcgcatcgcc

SEQ ID NO: 842 - DNA, 158 bp, Pseudomonas aeruginosa
  marker
cacgccgaccggcgcccccaccgacaccgtcggctggggcgtgccggatctcggtcgggcgatgcatgggcctggacaattgctcggccgcttcgaggccaacctcccggccggcctgcgcgacgaatggagcaacccgatttccgatagcgccctgc

SEQ ID NO: 843 - DNA, 156 bp, Pseudomonas aeruginosa
  marker
cgccagcgcacgctgatccgctttcacacttgggacagggcgaccatcggtcgcccatttttttatgcccgggaaagccacctatccatggtcgctttgacagccgcgagccagccccggaacatgcgggtccgtgaatttcgcccgatgaggttc

SEQ ID NO: 844 - DNA, 155 bp, Pseudomonas aeruginosa
  marker
cggctccagggactcgagaatctctcggcgccgggcccgagtggcggaaggaatcgccaggagaacctcctgcgcgcccgtctcgtcgatcatctggcggatatgcttggcggtatagacccgcagaccggcgatgacccggttggcgatctgct

SEQ ID NO: 845 - DNA, 154 bp, Pseudomonas aeruginosa
  marker
tcttcaagacaaacagccgagcatcgctcggctttttgttgtccgcgaattttcccttcgagccacgccaccctcccccgctcaccgcggcgccgaccccggaaatgaaaacgggccgcatgcgcagcccgttccgtcatcgccccgctatccg

SEQ ID NO: 846 - DNA, 153 bp, Pseudomonas aeruginosa
  marker
acgaattggggctcgggtcggtgtgcgtccgtaacgactagatacatcgatcggcaggcttggcatcccccaccgatgaaaggctgcggaattatgcagatttcgccagaatttacaaccgcattaaccacttaatttcacgaggacacccgc

SEQ ID NO: 847 - DNA, 152 bp, Pseudomonas aeruginosa
  marker
aggggcctcggccgactcgtaacaccctgcaacctgttaccgcggacgtaccgcgtaacagaaaccgggttcatcggtaacgggaacccggtttttttgtgccctccgccgacccaccgaaaacctcaaccccttgattttactgggtttcg

SEQ ID NO: 848 - DNA, 152 bp, Pseudomonas aeruginosa
  marker
attgcggatggtgtggaattccgcgccgcggatcagttggccgaactggcgggcttcgtggggcgtggtgtagatgtccagctcgccgttcatgaacagcaccgggatctcgatgccggcgaagctctcggtatagctatcggcgttcaggc

SEQ ID NO: 849 - DNA, 147 bp, Pseudomonas aeruginosa
  marker
ctggttcggttcttccgtctcgatacccatcggtggtcctcccttttcacatacctgccctgagagtctagacccttggcgggaggagggtggcttcaggcctggcgggcggaggatgcgccgttccgccgtgccctgcgtggccct

SEQ ID NO: 850 - DNA, 146 bp, Pseudomonas aeruginosa
  marker
ttcgaggccgacaacccgctgcatggccgcatccgccccggcatgtccgtcgaagccgaggtcgagctccgtgaccgctgaggcgctggcccggccgcttggcgaaccgacccggcgcgactggatcgcggtgctcagcgccatgc

SEQ ID NO: 851 - DNA, 146 bp, Pseudomonas aeruginosa
  marker
gggctgccgctaccgaaggcagcggcagcagggtgaggtcgggatgctgggcgatcagcagttcgtgaggagcatagtggtcgaccaccgcgaccttgagcccgtagagctcgtcgatgcgcttcggcatcgggccgttcttgcgt

SEQ ID NO: 852 - DNA, 146 bp, Pseudomonas aeruginosa
  marker
cgaggtcttcatcgggcggcttatcccatgcgattgggttatgcgatagtgctgcgtcgatcatcagtgcatcgaaatccctggtaaaccgcatggggctggatgcgttggataagcctggcttatgggagaaacgcctcatgccg

SEQ ID NO: 853 - DNA, 144 bp, Pseudomonas aeruginosa
  marker
cgagccggtgaacaagctgatggccgacatggacaaggaactcggcgtcgccgcgccggcccagaagaaaaagtgagtcgtgattcgcgatgagcatgcgtgaccgtatccagaccgccctgcagcccctcgatccgcaacacg

SEQ ID NO: 854 - DNA, 143 bp, Pseudomonas aeruginosa
  marker
aattcctccgaaagggggtgggttgtccggtcgcggcggggaggccgcgtggcaagcgggtttgacgctcaggttggcgccccgtttgcgcttggtcaaggaaaaagccggcctgttccgggcattatggatagagttgcgtc

SEQ ID NO: 855 - DNA, 142 bp, Pseudomonas aeruginosa
  marker
agcacccgtgcctggagcagcgagcgcctgcaactgatccacgtgccggtacagccggaggcctgatcggccaccgacgcgcgcgcatgaaaaagcccggcaatagccgggcattttttgggttggcgttcgccttgcgggg

SEQ ID NO: 856 - DNA, 137 bp, Pseudomonas aeruginosa
  marker
gagtacgacgcttcagggcaacagtacggtcgagccggtggttcgccgtgcggccagttcggtatgcgccctggctgcttcggccagggcgaagcgctggttgatctcgatgcggatgtcgccgcgctcgatcaggc

SEQ ID NO: 857 - DNA, 137 bp, Pseudomonas aeruginosa
  marker
acatgcaaagcctgctgatccgcaatgcccggatggtcaacgaggggcaggtacgcgaaggcgatctgctggtccgccacggtcgcatcgaacgcatcgccggctgcctggaaaactgcggcgccagccgggagatc

SEQ ID NO: 858 - DNA, 136 bp, Pseudomonas aeruginosa
  marker
agccaactcgatctacgacacgcccggcaccttcgagttgagcaaggacggcagcggcaacccggtgctgaccttgcaatccgacttcgaccgctcctgggtcagtgtcgggcgtgccctggataacgccgatatc

SEQ ID NO: 859 - DNA, 135 bp, Pseudomonas aeruginosa
  marker
gtcctgcacatggccggatgaacgcggcttcgccagggaaggccgccaggcgttaagatgacgacctgcattccaaggtatcgaaagccatgcgttatcccgaagaccacaagcagaagacccgccggcgtatcg

SEQ ID NO: 860 - DNA, 134 bp, Pseudomonas aeruginosa
  marker
ttgatggccgctcccgacggcagcgacagctgatggaaaacgccacgcaacccgtccccctgatcgaactgcgcgacatccgcaagcgctacggcggcaatggcactccggaagtcgaggtactcaagggcgta

SEQ ID NO: 861 - DNA, 134 bp, Pseudomonas aeruginosa
  marker
acacctggcgctgctcgggagcaatcgccagctgagcgacagtatacggcaattgattcctgcctgacgcgtcaaaatccgccttttcagcgctttgccggcgacgcaggtcgctcatcgacaccccgccgagg

SEQ ID NO: 862 - DNA, 133 bp, Pseudomonas aeruginosa
  marker
cttctgggtttcctcgatcttcttcagggcgtcgatcagcacctggtagtcgtggctgtcccagggcttctggatgtccgggatgcgctggccgaggtagtagaggtcggcggccgcgagcgggcggccgaga

SEQ ID NO: 863 - DNA, 130 bp, Pseudomonas aeruginosa
  marker
ccctgtccttgccgctggcctgcgccagcagacgacgaagaccgtcatggaccttatcgaggaattcctgccagctttccagcccatctttctcatggttgccggaaacccagcgcgcgatgatggtgga

SEQ ID NO: 864 - DNA, 129 bp, Pseudomonas aeruginosa
  marker
agttcgacggtgatcgacgataccctggcgatcttgcgccaggtcgcaggcacctaggtactcaaggacggcaagggtattccaaatctgtttaaaaaaaccgccagccctgtctggacgccccacgaa

SEQ ID NO: 865 - DNA, 128 bp, Pseudomonas aeruginosa
  marker
cggaaaatctcaggatcaccctgttcattcgcaacggcacctcgcctaccatccccaaccccgccctggcggcacagatgctgcaggcagacctggccaaggccggcatccagctgaccatccgttcc

SEQ ID NO: 866 - DNA, 128 bp, Pseudomonas aeruginosa
  marker
ccgcgaggtgagcgatccggccgagcgggcgaaactgtacgagcaggcccaggtggtattccacgaacaggccccatggataccgctggcctacccgaagctgttcaacgtccggcggaacacggtgc

SEQ ID NO: 867 - DNA, 128 bp, Pseudomonas aeruginosa
  marker
gtaggtcaccttttcttctttagcgtttgctgccattgctctattgaagcgcgaaaacgcttcgtcggtcagcttcggcaacagaataatttttatcgcatcaggggtttacaagcagaatacgtact

SEQ ID NO: 868 - DNA, 126 bp, Pseudomonas aeruginosa
  marker
gatcaccgtcaggcccatgctcaccagcacgctgcgccggtattcgcgcagcacgccgagcagcccctggcgctcgccgggctcccggatggcttcgaggaaggcctcggtctcgcccatgtagcg

SEQ ID NO: 869 - DNA, 126 bp, Pseudomonas aeruginosa
  marker
tcccgcgagcgcctgtcgccgaccctgcgccatgcgttccagttgctgcgcgaagtggtccgcgaggacagcgactggtcgcagcgctgggactacgtgatctgatcggcctggcccaggtgctgc

SEQ ID NO: 870 - DNA, 125 bp, Pseudomonas aeruginosa
  marker
tatttcagacaaagccggtcattagaccgtttttgtttcagcagttcagccactaccaggcattgaaactgcgacaaggtttgcaacacccaagtcgatgagcgatcatcgcacaatgctgaaaa

SEQ ID NO: 871 - DNA, 124 bp, Pseudomonas aeruginosa
  marker
accgggctcgacttgtgacgaacgccgccgttttcacggcggcgttttcgttttgcgacgaaaggcacgatcaagacttgctattacgataataagaattattctcatctcacagtcttgtcac

SEQ ID NO: 872 - DNA, 122 bp, Pseudomonas aeruginosa
  marker
aagtgaaaaggcctgtccgaagacaggccttttggttttcgctcctcagaggcgaccagccggggcgtagggggccgggtcgatgatcggttcccgcccgctcatgagatccgccagcagac

SEQ ID NO: 873 - DNA, 121 bp, Pseudomonas aeruginosa
  marker
aagactgtcaggtcaaaatgagtcaaaaatcgaagccgcgtattatgcctattcagcacgaaaatgcacggaacatccgacgatgaattgttaccaggacgaattcgaccagaccaacggt

SEQ ID NO: 874 - DNA, 121 bp, Pseudomonas aeruginosa
  marker
agagtacatgacccagtcggccctggaagacgccagcctgcacgtcaacgagcacgctccgggcctgtccggggcggcgctggagaaactggtcaacgagtatcgcggggtgatcgccacc

SEQ ID NO: 875 - DNA, 121 bp, Pseudomonas aeruginosa
  marker
ccgccgatccgctgcgggttttcgaccaggcgctggaacttctggcggggcgatagctcccattgagccgcgcctgcggctcgggtaaggtcgggggattcttcttcccaagaacccacct

SEQ ID NO: 876 - DNA, 121 bp, Pseudomonas aeruginosa
  marker
aaacgcccgaaacccttgtagggcgcgcccttcggccatgcgacaccttgccgcagagattaaagcgtagacataaaaaaaacgcccagctccgaagaggtgggcgtttttcagcaagcgt

SEQ ID NO: 877 - DNA, 121 bp, Pseudomonas aeruginosa
  marker
gatagaccctcagaacgtcgagttcgccgggttcaatctgagtggcatctacggcgcgaccgcgaccctgatcctcgcctcggtgatcgtctacggcgccctctggctcaagcaccgccac

SEQ ID NO: 878 - DNA, 120 bp, Pseudomonas aeruginosa
  marker
caaacgaaatgacagagcatgcgccctgccaattttcggggtacaaaatagtaaagaggttcttgtacaccgtcaagacaaagccccggctatcgggatagccggggcttgtcgttgatg

SEQ ID NO: 879 - DNA, 120 bp, Pseudomonas aeruginosa
  marker
catcgccagctacctgaagtccctgccggccggcaaggacgacctgcccatgcccgacagcgaacgcccactggcagcaccggtcgacctgtacagctcgcggggcggtctcggctacgc

SEQ ID NO: 880 - DNA, 120 bp, Pseudomonas aeruginosa
  marker
gtcggcgcggtcgtggatcttctccagcaactcctggtagtcgcccggggtcggcgcggccttgccgcggccgaggctcaaccccagctcgccgaggaactggcgcaggttgttgagttt

SEQ ID NO: 881 - DNA, 117 bp, Pseudomonas aeruginosa
  marker
tgagcgggctggacatggatggacctggcgtcagtgggcggaaaggtgaaaagcataacaaaggcaggggctttccggccgggggtggtcggaccatgaatttcattcaagttgaag

SEQ ID NO: 882 - DNA, 116 bp, Pseudomonas aeruginosa
  marker
cgatggggggattcatgcagtatagccagcgcctcggggaggccggacgcaatgacagacgcagcatgcgtggcgcgttccgccccggcctgctgccgaccctggtggtcctcggc

SEQ ID NO: 883 - DNA, 115 bp, Pseudomonas aeruginosa
  marker
gcaggtctcatctgttaaagagccgggacgccgttgcgccccgagcgaaaagggtcgaaaggtccgtccagcatagcgcccaccgcgatcttgcacgcggcgggcgggacaggcc

SEQ ID NO: 884 - DNA, 114 bp, Pseudomonas aeruginosa
  marker
agcgcctacagcggcgaacagcaggtggatgtcgggcgcgaggtgaaggtgcagttcatgacctcgaacaatatcgacatggtctgggagttccgctccgccggcgaccagttg

SEQ ID NO: 885 - DNA, 113 bp, Pseudomonas aeruginosa
  marker
gcgagagtggagagtgcggacatggaggcttcgctatgagcggacgtatacggcgaaggctccaacagccatgggcaaaacgcaagggcgtcactcggcggcctggtagagac

SEQ ID NO: 886 - DNA, 112 bp, Pseudomonas aeruginosa
  marker
accaccgcggcacgggtgctgccggcactgacctcggcctgtagcgggaagggcttgctcgcatcctgcaacgccagcatcccgccgaccttgcccgagccggccagagcct

SEQ ID NO: 887 - DNA, 111 bp, Pseudomonas aeruginosa
  marker
tattgccgttggccaggtactgcagcacggtcatctcgcggtcggaaaggctttccagcatgcgggcctcgttgtcgcggctctgctggttgatgctgcgcaacgccccgg

SEQ ID NO: 888 - DNA, 109 bp, Pseudomonas aeruginosa
  marker
gacgtcggtggcgcgcacctggctgctcaactcggcgaagcgctgcgcgtcgttgcccggttgcagcggcaccagggtcttgctgacgtattccaggccgggggtcttg

SEQ ID NO: 889 - DNA, 104 bp, Pseudomonas aeruginosa
  marker
ctttccgtttgatcctgaccgggggcggccggcgtggtccgccgctcccggacagtcttgaatagaagaggtgtgacatgaacagccaaatcaccaacgccaag

SEQ ID NO: 890 - DNA, 104 bp, Pseudomonas aeruginosa
  marker
gtggccgagcccgatgggcagcccgctggatacctcgatctcgccggcggtgctgaccgtggaaaggccgacgccatccttccacggcggcaccggggcgctgg

SEQ ID NO: 891 - DNA, 103 bp, Pseudomonas aeruginosa
  marker
ccgacgggtcgtcggaagtccccggcaaaggtaggggctcccttgcttgggcgcggccggtgcatcaggtaaactgctggcctctccggattgcataacgaca

SEQ ID NO: 892 - DNA, 102 bp, Pseudomonas aeruginosa
  marker
ccagagcaagcgcgaaccgcgcggtcagctggtgcccatgccggtggcgaaagtcagccggcgagattccgaaatttaggcatgacagataaagaacaggta

SEQ ID NO: 893 - DNA, 102 bp, Pseudomonas aeruginosa
  marker
gcgtgagggcatcactgctccttggtctgctcttcttcttcccgggcacaccagccgcagcgaaattcgcggccgagctgtctgtgccgctcgttttcgtca

SEQ ID NO: 894 - DNA, 102 bp, Pseudomonas aeruginosa
  marker
aagccggtcgttccgggcagttctacctcgccggagaaaccgtcgaacaatggcaagccctgagcctgcgcaacctgtggacggtggaggacaccgtgcagt

SEQ ID NO: 895 - DNA, 101 bp, Pseudomonas aeruginosa
  marker
acgcgaggtaccgctcgggcaagcgtgcatgggaatctcctggtaaccgggggaatgccggcgcggctcaggccgcgccgttattggcggcagtcagtcga

SEQ ID NO: 896 - DNA, 101 bp, Pseudomonas aeruginosa
  marker
cctcgccggcttcgagcagaacaccgcgcagcgctgaaacgccgcgcgtccatgaaaaaaggggttgccatcggcaacccctttctcgtttccgccccgga

SEQ ID NO: 897 - DNA, 8458 bp, Staphylococcus epidermidis
  marker
ttaacacaataacaataatataatgactttaattaaaagtcaatataattattcttgagtttacactagaacttctttacttaagtattgatcaacagaatgtgctacttcacgaccttcttttattgcccaaacaaccaaactctgacctcgtcttgcatctcctgcagcaaatattttagcgtgattagtttgataatttgtatcattagctacaattttattacgctcggtgtgtatatcaaacgcatgcggaacagtggtttcagtaccaacaaaccctatagataataagactaaatcagccggccaaaatcgttctggtccatcttccatcaccatgccatcaggcgtttcttttaatatttgtgtatataagcctttaacatttcctaactcgtcaacatcatagcgcattgtttgtacaccataggctcttggttcttgaccaaatttagcttcatattccttatgcgcataatccattttgaaaacaggcattgctaatggccaggaagtattactttcaaaagtaatctcttcaggctgtttcgtatatttattaaattgaacaatagatttacagttttcacgtaatgctgtcgctacacagtctgcaccagtatcaccagcacctataataattacattcttatctttagcagtaatgctcaaactttcaatctcaccatttagatactgtgtttgttcagtaagatagtccattgcaaaatgaataccagagcccattcgtccttccaatggtaaatctctcgcattttgagcacctgtgcataaaataatagcatcataattttcttcaagtgtttcacggctcacatcgacgccaatttcaacgcctgttttaaataaaaccccagcatctttcataagtgatacacgtcgacgtattacgtctttatctagtttcatatttggtataccatacattagcaagccgcctggttcatgcgccttttcataaacagtaactttatagcctttaaagtttaattcttcagctgctgtaagtcccgctggaccactacctacgatagcaactcgttggtctttatgatcttcaggatatgcgggatgaacccactcattctcatatgcttcatcaataattgtacgttcaatacctttaatcgccacggattctctattaattttcataacacatgattgctcacatggtgcaggacaaactcttcctgtaaattcaggaaaattattcgtctctctcaatctttcgtaagcagctttaaaatcttgatgatagactaagtcgttccactcaggtatataattaccaatagggcatcctattgtttctcttccataagattgcccagtttgacaaaaaggtgttccacaatccatacagcgcgcaccctgaatcgaagcatcttctttagtgaagcgttgttgaaacgcttcatgattcgaaagacggtctaccaaagacaattctgatagcgactgtttatcatatttcataaatcctttaaattcgcccatgataatccctcacttctttaataaatgactgctggctgtagctcttgttcaattgtttctctgtcatcataaaacgctgccagtgttgcttcatcttcacgttccatttgacgttttttcaaatcaattttttgcatcattaatttgtaatctttcggaataactttaattgctaacttttcaatattgtcaaattggtcaagtaattggcgtgctttgttactacgtgtatgcttaaaatgtgcttcaagcatgtctttgataagagatttttcctcatcaaaacgtatgctactgaattctaaagtttcaagcgcattaacctttttaaatttctccacgtcagaagggaaaatataacttacgcccccgctcatgccttggccaaagttctttccaacatctcctaagataatgacatgtccccctgtcatatattcaagtccatgatcaccaataccttctactacaacatctgcaccactatttctgatacagaaacgctcaccagctttaccattgataaacgctttacctctagaagccccgtaaaagtttacatttcctgctataatttcattttcacgttgactatttggagcatttacgatgacagttccaccggacaatcctttacctacgtagtcattagcatcaccggtatgatggattgttaatccgcgtggtgcatatgcagctaagctttgacctgcatgaccttcagtgtaagcaagtatcgtatcttcaggtaatccttcttctccatattgtttagctatcgcactacctgtaattacacctacatctcgctgttcattattaacaacataatttccggtaaaagagtgcccgttttcaatactatagcgtgcgtctgggtacagataattcaaatcgaatccttcatcaagatgatggttttgtgatatctctttcgtattaaccccgtcaaattgttctattaaacgttctatttgaagcgaagctgctttactatttggtttcaattgcgtcgaacgttgaagaagatctgttcttcctactaactcttctactgtttctaaaccaagtgaagccaaaatttcacgtaattcttcagctataaaatacataaagttaactacatgctgtgccttacctctaaacaaagctcttaaatctttgttttgtgttgcaacccctactggacacgtatcgttatgacaaaccctcatcataatacaccccaaaacaacaagtggtgctgttgcgaaaccaaattcttctgcaccaagcgcacaagcataagctacatctttacccgtcagtaacttaccatccgtttctaattttacgcgactacgcaaatcatttaatttaagtgtttgatgtgtttcggcaaggcctatctcccatggcaaacctgcatgttgaatacttgttttaggcgatgcacctgtacctccatcataaccacttataacaattttatcggcgaaagctttagctacccctgaagctatagttccaacgccagtttttgatacaagcttaactgcaatatcagctcttctatttgcattttttaaatcatgaatgagctgtgctaagtcctcaattgaataaatatcatggtgtggtggtggtgaaattaatcctatacctggtgtcgaacctctagtctcagcaatccatggatatacttttgaacctggtagttgtccaccttcccctggtttagcgccttgtgcgactttaatttgaatttcttttgcatgttgcaagtaatcactcgtcaccccaaaacgacctgatgcaacttgcttaatcgcacttatcttattacttccatccttttgaatttcgtaacgtgaagaatcttctccaccttctccactattacttttacctccaatttgattcatagcttgagccaacgtctcatgtgcctctgctgagatagagccgtaactcattgctcctgtattaaaacgttttacgatttcacttgctggttcaacacgactaatatcaatagattggcgtgtcttgaattctaataaatgtctaatatgatccgtacgttttaaatttacagttttggagaattttttaaataactcgtaatcattttctctacatgcatgctgcaataaaaaaatcgtacgaggattaaatgcatgatgctgaccttgctgtctccattggaatacacttccggattcaagataatcagaatcatcactttgtctcgctttattctctttgtctatttgttcaatacttataccagataattttgactgtgtacctgtaaaatatttttcaatgacgctattcgataaacctaccgcttcaaatatctgtgctccttgataactttgtacagtagaaatgcccattttagccatcactttaataacgccttctgacaatacattggtatacgtagcaacattttcagcgacagttcctgaaagttgaccttgacgcgttaattgttcaatcgttcgttgcgctaaatatggaactacagcgtttgcaccataaccaagtaaacatgcaacgtgatgaacttctcgtgtttcaccggactgcgcaatgaggctggtctccattcttaatccttctcgaattaataattgatgcacgtgacttaacgctaataaaattggcattgcataactattttcgtgagttaaagacgtatcgtctaacaccaaaattttcgcaccttcatgtacagcctgtattgctcggttccctagttcatttaagctactttccaaatcacctgtataaagtgtagataaatacgttacattaaaatacgaatgatcgattgatgataattgcgcttcatttaaaactggtttttttaattgaattctttctaaaactgattcatcaggacataagaggttcccttctgaacctaaatatgaaagttcactagttacaatcttttctcgataagcatcgatgggtggattggtaacttgtgcaaataattgtttaaaataattaaatagtgactcaggcttatcattaagaactgcaataggtgcatcatatcccatcgctccgatgggatcttttttattgatgactaaatctgtcatatatttattgatatcttctttagtgtaagcaaattgtttctgtaagcggaagagtgtttgatcatcccagtcggaagattggtaataaatattatctaaatcatttttatttttataatcttttagccattgttcgtagggcaactcattagcaatattagtttttagctcattattttctacaaccttattttgcaaaaagtctacaagtaataactttccaggattaagttgtcctttaaatgctacattttcttctggaacatcaatgacacctacttcggaagaaaaaacaataaaattgtctttagttattgtataacgcccaggtcttaatccatttctatcagtcaatgcacctatcttatctccattgcaaaaggaaatcatagttggtccatcccatggctccattaaataactataaaattcatagaaagagcgaacttttttatcgttagattcattgtataaccatggctctggaattaataacatcgctgctttttcaggctccattgctaatgataagaactctaacgcattatcaactattgatgagtcactaccatcttcatcaacaataaaatgcaccttatctttctcatcttcaaataatgtttcaactagtttattttggcgtgctcgcatccagtttacgttacccttaatggtattaatttcaccattgtgcataagcatgcgattgggatgtgcacgtttccaacttggaaatgtattagtactaaagcgggagtgtacaagtcctaattttgattgatatgcctcattttgtaggtctaaatataagcctttaatttgatccgaacgtaaccaacctttataaacaatcgttctatgagagagacttgtaaaatataaatctatggattgtgtttcactatatttttcaatttgctttcttgctaaaaacaatcgtttttcaacttcttttacacctgtgatgtcaacaaatacttgttgaatataaggcatagtatctgcaacatgttgagcaatagcgcgagtatctactggcacatctctatatccaatgactttaaaaccttcactttcaaaatattgattaaacatctcttcgtgaattgaatctctaactttctctttagaaaaaaataatcccacggcataatatccttcgccgggaactttgaattctgttaattgttcgaacaattggtatggtatctccgtcataattcctgcaccatcaccagtaataccatcggcacctactccaccacgatgatctaaccgtcttaacatttctaaagatttttctataatatcgtgagatcttttattatccatattggcataaaatccaataccacacgcatcatgctcttcacgataatcgtatagtcccttttttaatttctcattgtacatgatgcacactcccttattagaattttctgacaattttgtttgatagtaattactataatgtaatttatttatctgttcaatatataaattagattaaattcatctaattattagaacgattgtaaaaaatactgatatactaggtttagaataagacagtatttattttattgaatggagggaaatcaactatggatataaaacaacttagatactttgtagaggttgcacgtcgagagcatatttcagatgcggcattagaactaaacattgcacagtctgcgattagtcgtcaaatcactcaactcgaaaaagaattgggggtgacattatttaaaagaagtgggagaaatatcatattaactgttgaaggtagacagttactctcacaggcaactcaaatactagaattaatggataaaaccattcactcatttcaacaacacgtatcacataaccaacagacaatttatattggatatgaagaaagtgatgcctctcaaatgattcttcccctaattcaaacatttgaacaacaaagtaacagtaccatgattccgcaacttacaaaacatgataaattattagatcaaatcctttccaatcaattggatcttgcaatcactgaatttactcctgtgttagaacgggaaacacatttacgcgtcatgcctttatttgaagaaaattattatatgtatgtgcccaaatcacatccactagctatgactgtacatcccccgctatctcaatttacaaatcaatcactatactgtctcgaaccaatgacaagctcaataaaaagtaaattgattgaaaagactaaggcacaagtacgaatgatttcagatatgaaactcgctcaacatattttgagtcataataagggatttattatttctagtcaaaattctttactatatgatcacgtaaattggactaaaatccctttaaatcatacagaattaaaacgaatgctatgtgtagttatgcgaaaagataacaagaaaaacgacattaatatagcatggaatttaatttgcacattattaaataaatcgactatatattaaccattcatcttatctttgcaaaactttatcactcttcaacataaacatttcattgataactttttgagttcaatcataaaaggtcgtataatcactatatcaatatgattatcaagttgagaattgaggttttaagatgcaatccaagaatttttttaaaacaccttttacttggatgatgataatctttagttgcctgtttttaggtacgttaatattcacgttttttaacgatagattttataatatgcctataggacaaatcactcaaattactgatatccaatcacaaaaggtaacagacgagcacaaaaataaagatattaagtacaaagagaagataacattcaagattctaaatggtgaattcaaggggcaaacaacgacgattccccaccaatatgtgaaatctcaagctgattcagaatcattttccaaaaatgacaaggttcttttacatatttctaaaaatcctaaagacgcaactattatagagaaaaaacgagatactattgttgtcataataaccggcttatttttacttactgttttagttgtaggaaaaaaagtaggacttcaatctatattatctcttatcgttaataccattgccgttatgggagctattttaatacatgatcaatatggggctataagtttattctttttgatgacttgtgctattatcatttccacttctttcactttactacttgtaacaggttggcatagccgaaccttaattactattgtaagtacgctgattggtacgttcttatgtgttggaattaccgaagtcatcatcaaatttaccgggggaaatggaataaaatacgaaacaatcactttccttactctccctcctaaggatgtctttctagcttccgtactaataggtacacttggagcagtgatggatgtttctattactattgcaagtgggatgtacgaaattttaaaacgtagccctcaaatttccatgaaacgttgggctcttgccggaagacatatcggtcaggatataatgggaacaatgactaatatacttctcttttcatatctatctggtagcttacctatgtttctaatttatttaaaaaatgctaacactattacttatactatttcgatgaattggtcattagaagttgctcgagcattaactggtgggataggtatcgttttaactattcctataacaattgctttaatggaactatggtttaaactgcgaggtgttaatcaatgagtgcaattactattttaggtttcttattattgttgataatggttattttcggaggtaaaaaaggactcatttcttttttcactttgtttttaaatttt

SEQ ID NO: 898 - DNA, 3446 bp, Staphylococcus epidermidis
  marker
tcttgcaatagcaactctttgtttttgacctccagacagttgattaggatatgaatctgctttgtctttaagccccactttttcaagtaaatataaagctttctcttttaattgatctttactatctttatgtaataaaagtggtgccaacattacattttcaatgacctttttatgaggaaataaattaaaattttgaaataccatacccattttttgtcgtaaattatctaaatgaacattatgttgagttaattcattatcttcaaatataactttaccttttgaaggtacatctaacaaattcatacaacggagtaaagtgcttttaccacttccagatggtccaattattgcaaccacttcacccttttcaacagtaagattaatatctctcaatacttcatttgctccaaattttttatttaaatttttaatattaatcactggcactcattctcccttcaataaaattcataacacgtgtaagtgcaaatgtaagtaagaaatatagtaatgctgcaactaacaatggtgtgaaaggatcaaaagatatcccttgtacaacttgtgcattaaacatgatttcactcactccaattgtggaaactatagacgattctttaatcaaggttacaaattcattacctaatgcaggtaaaattttcttaattgcctgtggcataactactgattgcatagtctgtctataattcaatcctaaacttctagcagcttcagtttgtcctttatctacagcattaataccagctctaataatctcggcaatgtaggctgaagaatttataacaagcgcaatagtaccacaaattaaagctgaaatatctaaccccaaagctgcagtagtcccaaaaaatacaataaacacttgcacaagcataggagtacctcttaaaaattctatgtatatacttgctatccattgtaatggtctaattttacttatttttaataaagctataaaagagcctaaaatagaccccaataccacacctactaatgaaatcaaaatagtatttttaattcctttaatgaaaaaactgccatatttagaaataaaatttccatcatcttgcatatcttcggctgcttttgtcatgtattgatcaattaaatttttttcttttacattatcaatcgtttgatttagcttatctaaaagtacaggagagttcttaggaacagctatacatgtttgtttcttttcttcattaaatttaatctttgaaaatgttagttctgaattttgttttaaatatgcctcacctactggtttttcaacaactacacctgctacttttccactttttaaagataatatagcttcaggtaatctattgagtgaagaaattttactatcttcaatctcagtttgtgcaattttttcttgatctgtccctttttgcgcagcaatttttttgccttcaaaatctttgatgttttgataacgttttgcatcatcttttttaatcatcatcacattatttgtaatcatgtaaggttttgtaaaatccacttctttttttcgttcgggagttgttgtcataccggagataataatatcgattttaccggtcttaagtgcacctaataagctatcaaattgcatgtttacaatttttagctttagatgattatctttcgcaatctttttagctaattctatatctacacccgcatattcagttttaccatgtatcgtcttttcaaattctaaaggtgcataatcagctgacaatccaactcttagttctcctcgattttttattttagtccaattttcatcttcatttgcatatgtactcggactgatgaataaggtgaaagtacttaacattattattatgattgatagcattttgaacaaacacttcattgttttgacctcctttttaataattatacattattatacataaatacacatattcgcgcaattagattttcagatatagtataaaaaaatacccgagacattgaatgtctcgggtatttttatactatctaaacttaataaatatattcattaagttattcaaatttcaacttttaccttaaaaaaagtaaagagtttgttacatatcatatactgattcctaatataataattaaaattaatcttttgagatttcaaatttatatatttcatcactgtatgtacttaatacttttttacaaattttgtgtacaataaaggcacctgcaaatggtatcacgaaatatccaataattaataaaataatattcatagatggatttcccgacatacggtttaatgcattgatgggaccaaccaatccagtataaccaaagccagcagatagtgcagtccctttaatttttaaaatataagcaattataccacatatgactccattaattgtcaatggtatggctataattaaatgctttaagtacacaggaatcatcattttagcagcacctatgagtaataccacgttaactccaagagaattaactcttaaagatccaaataaaaaggttacacaagctgcaactattcccatatttgcagcaccacttcctaaaccagtaaggttaattgctgttgctatagcaactaacgagattggagttaccattaataaagaaaatgttacacaaattaatatagacattaataatggatttaattctgtaaacctgtttactaattttcctagtgactgcgtaataacttgaacgtaaggtaatgttaataaccctattaatccactaattacaggaactaaaacgggtaaaataatcatttctaaggaacctaatttcccctctaaaaacatataaatgaaacacgctaatataactactaaaattacatttataatatctccaattccttttaattcaattgtttgtccattatagtgtacagctccagaacctagcattgctgaaataccaataattgcagcacctgtacctttaaatttaaattggtgcgcagcaagaacccctataataaaagccataaaagattgtatgattgttactagctgaaaaatcgtttctagtacatgattaccttctttgaagaattttaataattcacctaataaggcattaggtaacagtgcaataactacccctgctcctactgcattcaaaatgttgttaaaaaatcgctttccatttatttgcgaatgactcatgttaaacctccatttaaaacattaaattaatcgtattatagaaacgaaatataaacaatcatttaatatcaaatttcatgtcaataattaaagaaatttgagcatttatacttaatagggataatatttagcatttacttatttgataaaaaaacatccaaggttaaattatatatttaaccttggacgcatatgttatatatattttataaaaactaaatttaattactgaatatttatatcaggtatatt

SEQ ID NO: 899 - DNA, 3273 bp, Staphylococcus epidermidis
  marker
tctcgttgatcaacttttagaaacctttccagtacatgacaaggaagcggcacatcgccaattaggtattatcgataaaaaaattaaaccagattctgttatgggatcaggttcattaggtgaaattatagagtcttttaatggtgtaacaggtaaagaaacttcagattggacaagggatacgagtcaggaactcattgattcaagagtgcctgaaaacaattggattgatggtgtacaagaaactattcaagctcttagaaatgaaggatatcacataggcatagtaacaagtgatactaaaaaaggagtcgatcaatttctggaggaaacgcaaactagaaatctctttgatttagtaatttctacagaaacacatgcagaagaaaaaccacatcctaaagtgttagatccactatttaatgcttttgatgttgaaccgggacaggtagcaatagtaggagatacggccaacgatatgaaaaccgcgattaatgctaatttaggattaggtatcggtgtgctaacaggcgtggctaaaaaagaggaactctacgacgcagatgtcatcataaacagtgcaaaagatgttaaacaagttatagaacaatacggaaaataaaatttttaaattgagtaagacgtagatgtgtgagttgattcgcacgtctacgtactttttcttttaataatacataaaaatcatcggttttatgagttgagatttaataatgtacgtagtgtaggttgattataagaatttttaaataaagaacgacgttgtagttctggtataatgtattttacaaaatcttcaaggctatggggtaatgaaggtggcatcagattaaagccgtctgcaacgccttcattaaaccagtgctccatctcatccactatctcctcaggtgtacctataagagtaagatgaccaccaccggcacttagataacctaataattctcttacagttggttgtttatcttttataattgctaaaactgtttcatatcgaccaatcggacctttgaaattttcaacgggaggtaagggaggaactggttcatctaattcccaatctgaacaatcttgttgaacaaaaaaactgagttgctttaaagcatcttcaatgggtaacttttgatcaagttctgctttttttgataatgctttttcatgggtttcacctacatacgttactaaaccagggaaaattttaatttttctatctggatggtgagttttagatatagcatcagacaatttctttttataactacgtgcttgcttaatatcccatgaaacagagtaaacagcatcagcatattttgctgctaatgcaataccttcttttgacgcaccggcttgcatagatactggtttaccttgaggactttgtggtgttgtatgtggtcctcgtacttgaaaatagtccccctcatgataaaaaggtttaatatctttagactcaataattttgttgttgtttttatctggtacataagatgcagttgaccaagaagtgaatagcttattcattaccgatgcaaattcatctgcttttttgtagcgctcatgtctttccggtaagtattgaagactgtgattttgggcttcaatatctgtcatggatgtgaccaaattccaacctacacggccatgagataagtagtctagacttaataattgacgagaagcggtgaatggatttgaaaatgtactcgatattgttggcactaatcctatatgcgatgtaacttgtgcaatagctgataagttaattataggatcaaaccaaaaagcgggcatagtagtattatcactcgcattaaaggcttgattgtctgcaaaaaagacgatatccaaaaagcctttctcagctatttgagctaaatgctgataataagatatgttgccgatatcctcaatattagaatctttcatacgccatgccgcttgatgatgaccacacccatacagtaacacacctatgttaagaaagtgattatttgtcatatgaacacctcattaattattatctttttgtaaaaaatacacaaccgaagagtgtaaacgcttagttcattgttaaaccaccgtcaacggtaatattttgacctgtcacgccacgtgcttcgtctgaagcgagatatacaaccatattggctacatcttgaggtgatgttacttttctaagaggtgtagtttgagcaattaaatcaaatacttcaggtgtagtaactgcacttgcatcagtcgttttgagtaatcctccagaaacaacatttgctgtgataccatattgtccaagttctgcagcaatattacgggtaaagccgatgagacctgcctttgctgttgtatactcatgataaggtacgactggattttgatacaaattggttccaatactaataatgcatccactttgttgttctataaattgtggtatgacgctttgagtcacattaaatgctccttttaaagtaccattaagttgttgttgataatcttcccaagttaaatcttcaaacgatttttgctgatttggatcaaatttaaaaccaacaagtgcattattgattactatatctatttttccaaaatgttgtgtggcagtttgaatcatttgattcacatcgtttctgtctgtcacatcagcttgaatagctatagccttactttgattataatttctaattaatttttcagctttatccttattttgtttgtaattaacaacaacattgtagcctttttctagtaaagttattgcaattttagcgcctaatccacgactacttcccgtgataattgcagtttttttcatcttcatgcccccaataatttttatttgtataagaaaaaatgcacaaccttcatgagaaaagttgtgcatccaaatcaatatataaagacagaatgataattagatgagattcaacactttcctccgctagtataagctagttcaggttcaaagggtttggatgatatccatctcagttaaaaaacacccctagtgcatataattcacttatagtataaacatagaatttttataaaatattgtcaacattcttaataatagctatatctgttattttaatattgaagtaaaaagtatatgaaatagcttgtgaaagtatacaaatataagctctaattttctacaattggatatattatcttgtatccacttgtcggtatgctttaataacttgagcaattttatcaatgactggatcaagggagtctaaatcttcgtgtatg

SEQ ID NO: 900 - DNA, 2523 bp, Staphylococcus epidermidis
  marker
taagaactatattactataattctgcctctctttgcaagcgtaaaaatttaatcttcttcacttaaaagacaaacacgacgattttttgaacctcattaaaatgtaattatcgtcgtcttgaaaattctttgaacttaaattctgtggctaaatgttttgaaatagtatattgaaaacatctggtaacttttaaaaaacagtacttctgacagtagctgtaaaaggtgtaaaatgatcaccaaaaattccgtagttaaaagatggaaaagttttaaaagtaatagacttacttgaataacttatatctaatttcaaatccttttcaatgattaattgtcgttgaagacatttctcctacggtcattaattctttatttccaaaagcatttaaattttctgcacaatgagttacattgaaaatttattcatatatataaattacaaatacaacataaaagctaggacataatttctagcctcttttttattttaaatataaacatataacatgtcaccttatttaaacattatagacgtaactaagagagtcacaccagacagacaaattgaagttatacagatcacaatgaatggtttaagtgcttttgaaataacttcttttaaaacgatattcaatcctagagcaaccatcgccattaacatacataacgttgtaataacatttataatattcataagtaatgaaggaataggaacaaatgtattgatacaagccattataataaatccaattagaaagtaaggaatatcgattttttgttgtacttgacttgagtgtgacttataacgcatatacaaaatcaagacaatacttaatggaataagtaaaaacacacggcctaattttccaagtaaagcaaatgtcattgcctccgacccgccaatacctgctgctaaaacgacttgagcgatttcatgtagactgatacctgtccaagcaccataagttatagtaggtatgttaaaaatagcctcgatagctgtataaataagtgcaaatatagttccaactagtgcaataatacctacacttattgcaatgtctttttctttagattttaagattggtgctgtagctgcaatagctgcagctccacatactcctgtaccaataccaagtagtatagagatatctttatttcctttaataatttgattcaaaagtaaagttaaacttattgaaaagataattacgataatatcaataagtagtaatttccaacctttacctagaatatctcccatatttaattttaacccatataagataatcgcaaattttaataaacgtttcgatgcaaacgtaatacctgggcgaatatgctcaggataacctatgacttggcggtatatcatcgcaaaaatgatggcaatagctaacgccccaatcgtatgtaaaataggaaatttagctaatatataactgattattgcaatcgtaaatgtaaacataatacctttcataaatgaagcctgcgttattgatttcatatgtactttcacctcgatatgaaatcttagcacgttattgttatagcgttaaataaataataagtatagtatatatatcaaaaatgttatattagaattaaaggagaatgatgcatggatccgtataaggtattaattgaagtaatgaaaacagaaagttttactagagcagcagaaaatttatatacttcgcagccttctgtgagtcgtgatattaaacgtttagaattaaaatataatgttaaaatatttgaatttaaatctccatatttaaaactaactagagatggcgaaaagctattacaatacgcattgcaacgggaaagtattgaacaagaattatggcaaaacttaacatcggaatctgaaatcatctcaggcaccttaacaattggaagcagttatacatatggtgaatatttattatcagaacagcttaccagtcttatgcaacaataccctaagttacatattcatttacgtgttaataattcagattctgttataaatgatattaaacacaacagagtagatataggtattgtagaaaaggaaattcaagacaatgcaataaaatgtaaggaaataatggaagacgaaatggtgtatatttacaaaaaatcgattcaacctagaatggatatatgtttcgttagagaaaaagggtctggaacaaggttttatcaggaagtaggtctttctgagttgaaattaaatccatatttgatagaaattaacaatattaagattattaaacaaatggtagaggctggaaatgggtttgcaattatttcaaaatcagcacttcatccagaagattatgaaaaattaatgataacaactttaaatgtgaaacgtcactattaccttgctcaacatgttgataaatatataggtgaaaatattagagctgtcattgaaatgattatgaagtagagtatataaaaaatctgaggctaggaattatgtcccagcctcttcggtatctattagtcttggaatttaaattc

SEQ ID NO: 901 - DNA, 2478 bp, Staphylococcus epidermidis
  marker
ttatttttgactacctattaatcatatcattaaatagttaatgatgtcaacactttatttaaattattttaacaatttctttaaatgtcattaaaaaataaatgtaacacttaaggtttaacgccctctaaacaattacctattaagtatataaacttaagccataatagtcaatatcgtttttcgatttatttgtgtaaaaaattacttcatatatcattttataatttaaattactaaatgatatgaattattatcaataatatttaatgtttgaaagtacagactaggatagatgtgtaaacatcctacctagtcatatatccttgcattctgttaattaaagaagtaaatgttacaaaaccttcctcttctaaaaagtgtcccccatcttctactacacgtgtatgtccattaagtgaattcatcagcctttgtgtttccttgtatgaaacatattgatcatctttagacgtgagtccataaaatttatctacttgctcttttattttatcgtaatcgatggttaccccttttaaatctacatcttcgtctatatcttgtgcatcttctttaaatcctgcgatactaaagaaaccttcaatgtgatgatgcgtttcttcaagaaattttaaagcagcgattgagccaaatccgtgggtcacaaaatatgtatcttttttacggatatgtagttgttgtttcatttcattaacccactcatcaatttgagcatgatcatttgcttcaagattgaataaagaaacatcatacccttccaaagttaaattatgccttaaccattcataccaatgatttttagaattaccatgttttgagtgtacaattataatgtctgtcatctttcctctcactcctttattaattctattgtaaataaaaacactttaaaaagaaatcgaataagtttccttgccatatatttatagcgtaaatctaacttattacattcttctaattaaagtgtcattatattattataactcttctaatatttcatcaactgcattcttaccttgttgtatgcagtctggtaaaccgacagcttcaaacggtgcccctgtaacacgtaatctaggataagttgttttaatatgttgttgaatttctttaatcattttaatatgacccacgtggtattggggcatactcttaggtaaccgatttacaattgtaaaatcaggattccctgagatggtcatcatttggcttaagtcttttctaacaattgatactatttcttcatcggtgtgatcatctactacagtatcacctggttttcctatatatgctcgaattaaaactttaccttctggagtagtaaatggccatttctttgatgtccaagtacatgcagtaatatccgtttgacttgttcttgcaataacaaagccagttccatcgtacgtattggtaatatttttctcatcaaaggccaaaacaactgttgcgacagtagtagaatccatgtttttaaagtaatcaaatgctggatcgtgactaaaccagttcagaaatacttgatgtggtgttgttacaagtaagccattaaatttctctttactgtcatcttctaataaaatttcataatctttttgcgaaatcaatatatctttgactggcgtgttatatcgtatgtggacacctttactttcaatatctttaacaagagcctctataaaagaactcaatccgtgtctaaactgtttgaattgtcctttaggagcacctggatataattgacgtttcttaatacgttgttctttttcgtctttcattcctttaatcaaactaccaaattgttcctctttttccttaaagttaggaaatgtactcattaagctcaattgatcaatatcagtgccataaataccacccattagtggttcaattaagttctctaatacttcattacctaatcgttgtctaaagaaactaccaacagaaatatcatcttcaatttctatcggttttttaaacaaatcaagccccgctcttaatttaccaataggtgaaatgagtcttgttttaataaatggtttaatatctgtaggaattcccataattgagccaccaggaataggatataatttatttttagcaaaaatataagattggccagtagtatttgttataaggtcattttctaatccaatatcttttgccacatcagtcataattgtcttacgacctaaataagactcagggcctaactcaattgtgtaaccatctgatctatatgtttgaatctttccacctactctatttgaggcttcgaagatagttacttcaatagaagggtcttgttttttaatgaaatatgcgctagataaaccagtgattcccgctccaataattgccactttcttactcacttttccacgcttcctttcagaattgcttaaaaatttattaaaatacgccatataccgactctaaaagaaaaaattataaaaa

SEQ ID NO: 902 - DNA, 2241 bp, Staphylococcus epidermidis
  marker
tatgaatgtataacgattcgtaatagttaaattaattttcaaagaaagagaatttgtctaaagtaaagtcttttcgaatttccttttcttaagaggagtcagtatgatatgaatgataaatggtatagacatataattggagcgcgaactattaaaactggtttggctactttttttacgtctttattttgtatgttgttaaacctcactccaatttttgccatacttactgcaattgttacaattgaacctactgctaaagcatcattaaaaaaggggtataaaaggttgccagcaacagttattggtgcgttatttgctgttgtctttacatatgtcttcggtgatcaatcaccgttaagttatgctttaagtgctacatttaccattctgatatgcactaaacttaatttacaggtaggaacaactgtcgcagtattaacttccgttgcaatgattccaggtatacatgaagcatatgtgttcaatttcttttcacggttacttacagctcttataggacttgttacagctggattagtcaattttatcatcttaccacctaagtattatcatcaacttgaagagcaattagcccttagtgagaaaaaaatgtatcgtttattttatgaacgctgtaatgagttattattaggaaaattcagctcggaaaagactagtaaagaattatcaaaattaaatattattgctcaaaaagttgaaacattaatgagttatcaaagggatgaacttcattatcataaaaatgaagataattggaaattattaaatcgccttacaaatcgcgcttataacaaccgtttatttatttcacatttatctaacattatttatttacccaaacatacgtctattgcttttgatgctaatgagaagatagcattgattaatattagtaatagtattaatggcatcattcaaaaaggaagctttgcacgtcaaaaaaaatctattgcaacactaaagtcttctgttaaacagatggatgagtttgaccaaaatcaaatgaaaagtacactcatatatgaaattctactcatatacaaaattttagattcacgttatgcaaaataatatgacgttaaaactaattactttattacatatatataaattatttcgtatgataaaaagccgtagaacaaagtttatctacggctcttttgatacatagaaatagacgcataaatctctttaatacattgaatttgaatgtttggctaactattcgtctacaccttcacctatcgtcacgctcgtaacaaatccatgtgtcactttgtattgtaatttaatcattttaccgtgatagacatatataccgtcttctggatattgtgaatcattgcttgtatgtggaatatgattcaatctctcatttgggtatgcatctttcatactttcaagtgatagtgattgattattaatactgaaacgtacacttatcgctgtatgattgcttgtagctctaatttcttgatcataaacctttttgtattcaatatcattagtatcatcttgctgaatctgataaccattaatatttaaatgaccattatctagggaattaataaattgaggttgagttaaaaatgttggattttcaccagcctcaccttctaaagaaaagctatgagattgtttggtttcgtttgtttggtgatgcttttctaagtaagtatgtgcttgtgcgacatgtgaaaacggaaaggctaacgttaaagcagctagtgtcaatgacgtcaatttaaaaatcttcatattttcactcctatatttattgtatggttcaattacagtttaacaataagtatatgtttcaaagtgtttttttcatatgtaatagaaattagcacctgagtgtctatgtttcaagattaatgaacattaacgtttcctaaatgtatatctaaaggtgctacgtataaatatagaagacattgttttttcatctcaacacatcccactttccacattttctttagcgttttagaaggaaatgctcatcactttgttcatgaccttttgttaattaaccatcggcataagttatttacaattcagtcattaactgctaatacgttaaaatgcccctagaacatgcattaatgttctagaggcattaatataataagtctttatacaaataactaattatcgtcatgattaacaataattattaaaaattaagttatattgagttattttttattttctttt

SEQ ID NO: 903 - DNA, 2214 bp, Staphylococcus epidermidis
  marker
tgcaattgacacgtggctttcgtcttctttttcatgcaattcttccttagagaattggtcccactgttcttttaactcacttgaagtagatgagcgattgaatcgatgaccaaaaggatcaatccctaaatcaattaattcttgtaatttttgacgacgaacttgcatttggtcgttcatttcttctgacataaatttctctcctttgaactttgatttatcaatttattgttccatgtctttctgttgaaaactttaggagctatatattgtttcctaatcagttttaatttatatttaagccttttattatacccttcttatcttcatatgtattgttattcaatgaaggttgatattgcatctaatcaaagcaaatctactcactttattattctacaagaccatcaaaatgtaataaagtaatttatattttcatcgaatagttgcaacccttataaacttattgattagcaatatataaatttctttaattaaaagtttcaaaaccatattactatgctttattattccttatattttttcacactattatcaggtactactagttgtccgatacttttattagaaatcggttctatttgtttggtggctatatcatttaacgggataagaacaaacgaacgttctttcattctagggtgcggcactgataaattatcttgttcaataatttgatcaccaaacagtagtatatctatatctaaagttctaggcccccaacgtatttctcttttacgatgaagttgttgttccgttgttaaacaacattttaacaaagattgtggattcaattcagtctctatctcaatgcacaagtttaagaatttcggttgattagtatatcccactggttcagtctcataaatatgagaaacttgagttacttgaataccttgatagtcatgaagtattttaatagcctcattgagttgtagttctctatttccaatattgctccctaatcctaaataagctttaaccatttagtcattctccctcactatttcaatcccaacaccatcgtaatgaccaggaataggtgggttttctttagtgattctaactttcgtttccattacacgattatagtgtgaatttatatgttttgcaatacgttcagccagatgctcaattaagcatgaacgtggcccttcaacaatagactttacatctttataaacctctccataatttacagtatcttttacatcatctgattgacctgcataactaagatcaacctttaaagtaatatcaacaacaaaaatttgtccaatatcattttctgcagctaatactccatgataaccataaaaacgcattccattaagaaagatgatgtcgttcatattcattctcctttagaaaatccatactttgggctagtcgcgtatttaataatacattatgaactcgaaccccacgaacgcctttcattataccataagccgttgtagctgcagttgcctcatctctatctgaaggagaagaatcttgattcatcatttctttaatgtatctttttcgacttgttgcaagtaaaactggatattcggtcgctactaattcatctaatcttgccattacttcattttcttcttctcgtgttttagcaaaacctattccaggatctaaccagattttattatgtggtataccggctagttcagccttattcgcttgcgcaagtaatgatacaagcatctcttcaacaacaggtttatctctatgaccgtcaccattatgcataagtacaatttcagcaccgtattgagataccacattaaacatattcgaatcaaataggcctgcccactgatcattaatcattgaaacaccaagtttaagacaagcttccgcaacttcacttcgaaatgtatcaaccgaaatttgcacatcatatttaacgatagactcaaccacaggcaatacacgattcatttcttctttaagcgatacttctttatgcgatacttctttatgacctggtcgtgttgagacacctccaacgtctatgatgtctacaccttcatctatcatctctttagcacgcttcacagcttgatcaactgagtggtactgtcctccgtcagaaaatgagtcaggtgtcacatttaatatccccattatttttgttttaatcataatttcacctttttcaataatatactcttagatttttttaatttt

SEQ ID NO: 904 - DNA, 2017 bp, Staphylococcus epidermidis
  marker
tccttttaatttcaatatttgtaaaataaatatctaagtaactaaaagcataactaaactacagtttcgtaaaacattttgaacacattatcccctcttaccaataacataaatattgaaacaaacttgataaaatcgtatttcaatccactatcgactacccatatgtaaaaatccttgagtcaatgacttaagttccatattaatcgaacgtgaacgaatccccaattcttttacaaaattttgaagaatatatcactttttcaatgacgttgaatagaatttaactacctgggtaaatatcataatgtaattgctaaaactaacgtaatcaatacgtttttataaataaaaggaggacctcataatgaaatatattgtggtaggtacatctcattcaggatatgaagtgatccaaacattgcttaaagaagatgaaaatgctgatattcaagtttttgaaagtgcagatcaaccgtcctttttatcttgtggtattcaaagttatcttgaagacatctcatcatcattagatgatttacattacgcatcagttgactcttataaggcacaaggtgtaaatattcatacgaatagcacagtcacagatttagatactgacaataagactgttgtagttgaacaccaaggtcaaacagcaacttattcttatgataaattgttcctaagtcctggtggcaaacctgttacccctccagtcgatggaattgaaaaatataaacatgtattatttatgcgtggacgtgattgggcaaatcaaattaaagaacgcatgaaagatgccaaaaaggctgttgtagtcggaggtggctatatcggtattgaagctgctgaagcttttgctaaagcagacatagatactacaatcgtagatgtcgctgatcgtatattaaacacttacttagataaagaatttacagacatattagaaacaaatgcacagcaacatggtcttcattttaaaggtggcgaaacagtaaaatcaatttcaggaaatcaaaatggcgaagtaactactgtagttaccgacaaaaatgaatatgacgcagatactgtcttatttgctgtaggtgtcgaaccagctaccgagtggctaaaagataaaattgatttaggtaagaaaggaattataaacattaaccaccaacaacaaacatctgctaaagatgtctatgcgggtggcgatgcgacattagttccttttgcaccagtatctgaggatcgttatattgcattagcaacaaattcaagacgtcaaggcgttgtcgcagcaaaaaacatgttgggtaaagaaatgacaatgccacgcgtttctggtacttcaggtttacaattatttgattataaatttggacaaactggcattcacggtacagaaatcgataattatgatggcaatttaggtcaaacatacgtagaagaattgattcgtcctcagtttatgcaagatgatacgaaaattcatatgaaaattatttatgataaagacactcaccgtatacttggtggtcaagtcatgtcaaaagaagatattactgcttctattaacacaatttcagtagtaatatctgctggtttcacacttgaacagctcgctgtccaagatttcttcttccaacctgattatgatagaccttggcattatcttaatgtgttagcccaacaagcattgggagatacatttggtagcgataagatgttattctaaatctcttaatctgatataggaaaaagtaattatctattgttgtcctaggttgatttaacctttatcagttgatagttaaattgcaaataccagttaaactttttcaattctattcatcggtgtttctgacgatatgatgcatttaaggaaaaccactgttacgatttatttacatttcacacatctaaatcatagttaattacaacaattatgtgatttttcatcattttcaagtagaaaaacttgagataaaaagtaatttttatcatactgtatatgaaagttata

SEQ ID NO: 905 - DNA, 1974 bp, Staphylococcus epidermidis
  marker
ttagttcatgatgtaaacacttcagaagaactcatgctcaccttcgaaaatattaaatctaatagtgatcgcatgcactttgtagaagtgaaaatggctgttgaagatgcaccagttaaattaagtaatatagctaaagcattcgcatcacaaaacaaatcatcttaatatctttttaaaattctataatataagcaattcaaacacccgtataattctctagttatacgggtgttaaatatatctttatagaagttgaaacttaaaaaatgacgtttcccgtgaaacaacattcatttaacgttatattttatatcgattaaaagtaacatgtatgaataatcacaaacatttatgattctaataaatcattcttaagacaccttttttaatgaacttaatcatatctttagccattgctatagttttagaatttgttttaacttccaagttaaaaattccaaatatacaaataagcctgcacattctttaatgtgaggcttacttgaattctctataaactccgattgtctaaatattgtttatcaataactgaacgtgtgatatctcgtaagtgtgcagggctcatcgaagaactatccatttgattgcgaccatgatgagtggcatctttgtcattatagtcatctagcatcatcactttaaagttcgacttaaggaactggttttggtgttgagttaattcgtaataattcaccatacttctccacttcacatcttgaacttgaaactgtttatctttcttactaattttaaaatctatccgtcctaataaatcattactttcattccctgttgactgaccgttcaagaaattccctaatgaatatgctacaagtgtacgattcccttctctaccgtcaacccattttactggttgaatcacatgaggatgtgtacctaaaactacatcaacacctgcatcagcgaaaatttgtgcatattttttttgagtggcgttaggctgatgcttaccttcattaccccaatgtgctgaaacaagtactacatcactttgttgtttggctttcttaacatcttgcttaattttattttcatcaaacgtatctaccgtataatcatgagttggttgatgatcgtttgtaccaaatgtgtaacttaataaagcaactttcacacctttaattgttttaataggaatttgacggtgtgcttgttctgattcatatacacccgtgaacaaaacttgatctttaaatttgttccaagtatgaatatgatttcttacaccttgctctccttgatctaaggcatgattgtttgcaccgtttacaaaattaaagccagtatctactaaatcctgagcaatactactcggtgtattaaagtttttaaatcctgaataaggcctatcatccccacctaatggtgattcttgattaacaaaagaaatatctgcgttttgaatgtctttttttactggttgatacataggtttaaaatcaaaactattccccgtaatttgtgcatctttatatacaactgggtgaattaaattatcacctacagcaaccacacgtattgttttatttgtattttgtttatcgctaaaagattgattaatcgaacacccactaacaactatgaaaaacgtaactaatatcatcatatatacaaaatatttagatactgttttcattttctaatactttctctccttctataaacctttgtatttattttcatcatatcgctatacactttaataaacaatatacgatatgtgaacatgtcgattttaataaataactatagttgacttacctttcatctggattaacagtaacaccgcacaaaatcaataagtgaaaatactaagacgagtaacaatcattttcatattcgtttaataagatgtccgcctatatatccaaattcaatcctttgtatcattactgaacaaaccactcaatcgcacgtttaatagctcta

SEQ ID NO: 906 - DNA, 1953 bp, Staphylococcus epidermidis
  marker
tatttttggtaaattatatctcttcattagaatgtcttcattattaacagttgcatctcccatcagtagaatattaatgccgttatattcaattaatgtaacaatggaatgttcatttttatcatcacttaatggtataaaactatttaaaaagcttatcttactattatcaatatctatttttttaacttgatttacatccaagatatttatctttttttccttgcattttgtcgtaacctctttaagtaattctaatgggaaactttcaatatttaaaacgagattattcacattaatattatttaaaaaatatattaattcacccatatgatcggcatgaggatgtgtaattactaaataatttatagtggtgataccctttttcttaatacttggtaaaattttatatttggcaatattattatgtttaaaacttacattttcatttcttttaccacctgtatcaatcaaaacacttttatttgactttgttttgaataaaatgctatctccttgacccacatcaaaaagtgttaactcggcataatgtggtctaattaaatgtgtaaaaatgattaaaacaattaaaaaacttagtacggatgtaacaaaccctctatagacaagtatgtaaagaaaaattaacgttagtataatcaaaataagtaaactatattggtttaatttaggaatgtaccacttaaaatgatttaaatttaaaaataattgaactagccagtcatgaattttaaaaagcatatttatataagtatttaataggaagctatgttgaaaaaagtgaattaaaataaagtagataatgaccgaaggaaataatataaaagaatagaatggaacaaatataaaattagatagcaaacctatccattgaaattgattaaaatgataggtattaattacaattgaacctaattgagccaaaaaactaataataaacaaacatttaagtggttttaaagcacttatatatggttttgccaatataataaataaacttatcaaaaaagagaactgaaaaccaatgtgatttataaattgaggatttaagagaatcattaacacaaatataaatgaaagcacatgtatagaacttttcctaaaatggattggcaacataagtataatgattgcaattgaaatggcacgcatggcactaggtacaaatccagtataaacagcgtagattaataatagtaaaatagttacacctttaatgagaactagaggtatatttaaacgtactaacagttgataaacgaggacaataattgtaccaacatgtgtaccacttatagctagtaaatggtaaatacctatatctttgatgttagatttgtaatattcatcaattagagaggtatcacctgttatcaacgctaatattctttcaggatgcgtgaccccagatttatgaattattttggtgatataattttgatgatgatatataggagtgaaaatattgttttcttggcaagacttaaattgaactgttgaaatattcaacaaggacaactctttttcgaatttaaattctcctttaactcgacaacttttatgagttaaatcttgcttgaaatttgactttaatattttgtaaaagtatctatagtctttatttttataatttaatatgccagtatagtatgttgatttaggcgtaaaagatttgaaagtaacaaaatcatcaataaacggttcattatataaactatttatgtttttaatttcggtttggttataggaacttattaaaaaaaatgaacttatagctgaaataaacattaataatagtattataatattaagcctttttatcataattagtaacaaaagagttaatattaaggagatagagattactttgaattttatccaaagtacccctaccaaaaaagcaagagcaatgtaaaacattggttattcttg

SEQ ID NO: 907 - DNA, 1919 bp, Staphylococcus epidermidis
  marker
ttatatccactcctatcgttaatcgttctatcaacttaaggttacatgacttgacttagcattgtctaatatttatcaatcatttcaatatagttaaaagttataaatagtattttaaacttttaacaaccaatattgcttttatcatttgaagctattttcaagaacgttggtcacctggcataaatattgatacaactaaagcaatcagtccgacaatagcaatcattaaaaactgtaagaaaaagttagacagttcgcctacaaataacattaaaataggtgcaatcgctgttcctaagaataatacaaatgtattaacagataaaaagaaaccttgattgtttttaacaactacacctatttttgaaataacagtaggaatcgcaaatgcgatacctgcaacaaacaacacactaaatgttgtaataagtataatattcgtagttacacccatgagtatgatcgacacaatacatgttgttaatgcgatagttagcaagcgctttatacctatacgactgcttacacgccctgctaatagagataataacatgcctatcacaccgaacaatttcatcattgaggacacagacatgtctcccccaacttggtgtgatgtgacatattcatttaaaatatcatacatacttataaacataatcagtaatgttagtgaaataaataaacaatagaaaactttaagattgtctttgaaatctttaaagttattgaaaaacttaatgagttgaatatcaggatttttatgtggactctcaggtacatttttataaataactaatacgagaattaaatataagattgttaaaataaaatatacccactgccaattcaaataacttacgactaattcactcatattttgccctaacacacctgataacataaaacttgtactgatgaaactaattgctgttacacgtttcacacgtggataagtttcagttgtataagtcatgactacaggagaaaatgatgcagcaaatacgccttgtagtgctcttaatattaataacactgtaaatgaatgaacaatacctatcataagacagatgataactaatgcactcatacctactaaaatagttttaattctgccatacttttcagaaatcgttccataaaatagacaactgattgaatatgttaatgagaataaaacaccgtttaaagttgctatagattcaggaacatgaaagtcttctgcgaaagttgctgtaagaggtagagccgtatataaacttgccattacaatgatacctgaaataaacatgattgtcgtaatgagattatagtttttactttcttccatcgatttccatactcctttctaaattttattcaatacgattattatgacagtttgtttcaaattcctaaagagatatttaaattgacgaaaaattaaaataatataaatacacttgtatccatttaatttctttagacacacatgagagctgaaaaattgacatacagattacttcaatttaagattaccattacctttaaatatcaatatttcacaaacctatgattaaatcgttaatatattacaacatttatgttaaattgtgcatttaatttttattttagggaaaagagatgtctagaaggaattcatatttacagatatataggaggaatctttaatggttttacgttatgctacaaatttaaaactagctaaagaattatatgatgcaagtaaacctaaattaaaaggcgatcaaggtatgattaatactttcactaatacatttggtttaccggaaaactcagttaaattagcaggtggcgttgaagctgtagctgctggtttatttgctgctagttttttaaataaaaatatttcacgcttaggctcacttgcagcaatttcagtacttggtgttgca

SEQ ID NO: 908 - DNA, 1648 bp, Staphylococcus epidermidis
  marker
gctctcattcaatttcaaaataaagattgatagagcaccgataaaaaccattaagagatttttttacctattaatagatagttgtaataattaatgaaatattatatgttgggtgtagcaacacattatcattttatattaggagtgtgatacattatgaaaaggtttgcgaaagcatttgtcgtaagtggtattactttaggtgcaattttaggtttaaacgtaacagagcataatggtgtatctaatgaagcaaaggcacaaacagcacacagttactggtataaatataatggttatactgcatcgggtggcgactttgtacttagcaattcattttatcaaggtttaaaagctggaaacgttacatttaatggtattaaggtaaatcaaaaatatgaatctaagactgctactaaaaaaatatacgatcagacatttcaacaaattaatggaaataaagcaaacaacgtacaatttaaaattgcttccagaactgttactttagatcaagttaaacaaaagtatggaaaaaattataattatcagccatcattatctaaaaacaaaacaagtaagacagatggcttgtacggttatcaagtcggaaaaggaaacatcgttttccacgttaaagatgggtatgtcacaagtgctacattgtcataaatgattatatatagcaaattaaaaaacgagaatattattttaaaacatagataaacgggagtgggacaacgaattcaatatgaattctgtcccgctcccgttgcgtcatagttcaaaagaataataaagaaaatgaataatagcattacttaattaaagatgtgttacttgttatcttgttcgtcctgtttttcacgctcttctaatgaaatagagtaatctttttcatcatcaattgatgtcattttaaaatgatggatgggttctctttttaaagccctcatgagtgagaatatcattaataataaaatgatagagaatggtagacctgtaataactgatgcagtttgtaaacttttaagaccacctgcaattgtcatagcaactgaaatcgccccaataagtagaccccataggactttatgttttaaagttggattgatagaaccacctgtagccatacctgcaacaatatgcgtagttgaatcagcacttgttacaataaagatgaaaataagtacaatagctaaggaactagtgacttccgacaatggaaaatgtgataataattcaaacaaggcaacagtataatctttatctacaatatgaacaagcttgtcgttatgatttaaagcaagtttaatagctgtacctccaaaacctgcaatccatgtaaacgaaattagaggaggaataatgagtacacctacgacaaattctctaattgtacgtcctcgagatactcttgctacaaagcccccaataaaaggagaccaagaaataacccaagcccaatagaaaacagtccactgttgaatccaactatcatctcctgagtatggatttacgcgtaaactatattctataaaatgctgcaaataatcagaaattgctagtgtgtatgattctaaaataaattttaaatctccaaaaatcaaaataaatataagtaaaatagcacctaataaaatatttaaat

SEQ ID NO: 909 - DNA, 1644 bp, Staphylococcus epidermidis
  marker
aattgctttaagtatttcttcagcagattttttataactcatattcatcctccttttagaaccgattccaattacttaattatattgtaaccggttccaatcatttacacaatactcctattcatttttcttaaaaaatattaaactagctttaacatctgcagttaaatcaatatcactttggaggggatttagttgaaagaacgcggaaaaatagaaaaattgtggcgtgaagaaaaatatcgtgtgctatttcatgatcagaatgcatatcattcgataagaacgttattaaaatcgcctaccacattgggtgaagtgaaagaacatataacgcacgctttaaccattacacctacaaaaggctcagttatcaatgcttttgaacatatgtgggggtatttcaaaaaacaatgtacacaatatgaaaagcaacatagccgagaattaaaagcgttgtatattgaaaatcaaattgactattttgagctgttgtcttttttaaaaaatttagcagataaatatgctgtcgagtacttacaacaaagtaccatactcaatattacaaaatgaagtgacaaaatcatttaacaattatatttcgtcaggcaagcacgaatacgtaaaacagatctttatttatatgtcaattttggttttaaaataaaaaactgccggcacagtggtttgatactttgcaggcagtttaaaatctgtacatatcctttatacagaaaatcttgcgaaaatgtacgcctatagatgatgacatctatatgaaaattctactcatcaaaccactcacatttatagtttataagtatgattgagagtctttaaactatttgttgaaaagaattaaaagcgatatgaatacttaatgaaatctaaaactttacggcgagcaccatgacaatgcttaaaatttaaattaaatgttactttgggggagagtcattttaattcaaaattctaattgttgctacttcaatattgaacataaacttatggtacatttaaaacgtgcatagatgttgattcttgatgttgaaataaaatgtttaactttcatcaaaactacccatatgctaatgtttattcatcttaatttaaaaattaataatcaaaaaatagaattttaatggagttattttcggatcatagtgcttgtgttttcttgctgttgaattcattgatgtaattggaaaagttttaagagattacataggtatgaaacatttttgctcaattgataataagtgctgaataatgacacatcaaacatgttgagtcttgttatggtcgatatctcttttattgttctttcaattaacgttgaaatgagcagcgtacatttagttacagtgacttcgttttataattcattcgaacttctcctaaacctctaaattgctcttttagatttttaaaaggaaacgaaatctaacattaattatgtagtaaaattctctttttgactctatctaaattttccaaaataatgaccctatattcctaaatcaacttttatattgcgcaaaacttataatttctaacaattttctgtatttagccaagaaaaattttattttttactattactatttctttatcaatcgcttataattacatttattattctat

SEQ ID NO: 910 - DNA, 1543 bp, Staphylococcus epidermidis
  marker
ctttttttcccagcagtactcttattatttatggcaatagttaagaaaaagaaaaatgtcatactgatgttttggatcatatccctggtttcattattaatgatggttgttatttctcaacctcacttgaaccattctagagtatattttggaactgatacaagattgcagacactgcttttaggtgtacttctagcatttatctggccaccttttaaattaaatcccaatccacctaaaggattaaaaactgtgattaatagtgcgggtatcataggacttacatttttaattctattattctttactgttagtgatgaaagtgattggatttataacggtggattttatcttatttcaacaatgactttgctaattattgcaagtgttgttcatccaacgacaattttagctaagttattaggaaatcctttatttgtctacattggaaagcgttcatacagtttatacttatggcattttcctgtaattagctttattcatagttattttattgatggtcaattaccaacttatgtttatattatggatatcgtaattactgtattattagccgaattatcatttagatatgttgaaacgccattaagaaaggaaggtctaaaggcttttacatttaaaaaaacttacaaacctcagtttattagaacaattgtaacgttaattatgttgttaccttttatttttatactagttggagctttcgataaattcggaaaagatacaatttcaaataaagcacaaacatttaatacaaacgaggctgatcaatatcttattcatatgataccgattgataatatttcgttaactagcgatggtaaaaccaaagagaataagaaagacaatgatgtatatacacaaattaagccattattaattggtgattcagttatggtagatataggggaacaatttaaaacgaaagtacccaaagctaaaatcgatggcaaagtcggtcgtcaactctatcaggccgagagcctagttaaaaatcaatatagacattataataaaccatcagaccaaatcatacttgagttaggtacaaatggtgattttacaaaagaacaattagataatttaattgacaaatttggcaaagcacaagtgtatcttgtgaatacaagagtgccaagatcatatgaaagtcatgttaatgagttgatggcaaaagcagctaaaaataaaaagaatgtaaccctaattgattggtatagtcgctcaaaagggcatacagagtattttgctccagacggaatccatcttgaaaatgatggcgtagaggcattgacagatgagatattaaaaaatataaagaagaaataataaattaatcattgaggaagaactctattcatttggaattaagttctttctcttttttcatttctatgtcgtaataaaatgaaaaaataagcttttattgttgattaaatagataggaaggtctataatatagttaaggtcaaagaaagtcaaagtcaaatttgatttctctatattgatctactcttaatga

SEQ ID NO: 911 - DNA, 1465 bp, Staphylococcus epidermidis
  marker
gggctatgacatcacagataaacaacttgctatgaaaactgtgctggatcatgagtcactggttaaaggtatcgtttatcaagatacaacaacaccttcttatgaatcgcaaatttcagaactagaacatgaggcgttagctaaaagagatattcatattacagaagaaactttcaacgatttaactgcacaatttttataaaggatactcattcatagtaactagaattgcgtcaaaataagtaggtaaaataaaaacgaaggtgtacttgatacatcatgactatctaattttactgtaatttcttatctaataacgttaatgattactatagaaaatcaagaagtacgtttcaatttaaaagtattagagaacatgcatataagtaaataacatatttaaagagtgggtcagaataacattttaattctgctcactcttattttatctctatgttgcttgtcaaaagcactacgattcaataatgtaattctcatttaacgttttttacatgattaatcacccatctcatctaaaagtaaataatataagaatgacataatttattccaaattattttaaaaatatagataaagtatttaacaaatgaaattttactcagagttattattaaatacataaataatgtgaacagttaaacgcacagtcctaatcaatgcaataagtttgtttttttaataaatatgtaaaagattttgtaaaaagattttaagaatatgaattttgggaataataaaaatataagatgatttttcggaggttaatatggacaaatttaaatctatgacagaattaaaagaattgactaaagaaggaaaagattgggaaatagagtgtgaaaatcgttctagcatagtcactatattagcattacatggcggtggaattgaacctgccacaactgaattagcctatacaattgcacattgtggcgactataactatttttcctttaaaggtatgagaagtaaggggaataatgagttacatgtgacttccacacattatgatgaccaaattgcattagatttagtgagaggtagccaaagaactgtagccatccatggttgtgaaggtaatgaaagtgtggcttatataggaggtagtgatgacagactaattgagttaatcaccgaatctcttgaagatataggaattagcgtgcgagaagcaccacatcatatttctggaactcaagaaaataatattgttaatatgactcaaacccaaggaggagtgcaattagaactgacagctcagttaagaaaggagctatttaaaaatagaaaaagttcacgcaaaaaccgtgaaaataaagataattgggatgatttaatgtacgactttgctgatgcaatgaaaaaagctatagaacgtgcataattaaattctaacgcatgttaaaataatattataaaacttaattggagagatgaagcatgc

SEQ ID NO: 912 - DNA, 1298 bp, Staphylococcus epidermidis
  marker
tatcgttaatactttttttaaagccatcattcattcactcccattaatttctagtgtctttatcatatcatgtttatcgcgtacgctaaattattataatttttaaaaatgcaaatcaatcatcatacattagctattgtattgatgttatctttaattcgtgattaataggtaagaatgtcctctcattcttacttaaaagatcttcagttaattttattttgaaaatttgattgctaaagtaaggcttaatataataacttctttctttactttccatcactaattgatattgtgtgtaatgtattttattggcatcgataactgcaccttgagggatactgactgattctagaactttaaaacaattcattaaattttcatcttcattatgggaacagcgtagttggtgtcttaaatatgtagcgcgtataaaacgttctgttgacgtataaccacccggtaagccatttgttcctgcttcacagcccattgatcttactagcactttacctattaattgattggttgatttctgtggcgttaaaaaagcgtaatttcttaagttagatagatgccaatctaatttaggttcatttgttaaggtatgaacataattatctttaactattaataagccattgtgaggttctatggctacggtatgtcctgtttcatcagtgaccatgaaatgtaaaggaggaacgatattcaaagtcgtatttttttcattcataatattgattttcttaaccttttgttttaattcgctaatacttttattaaaacctaaaacccaaacaataaactcctcaggtgctaagttaaaataaccataacgtttatgggtactgtatgaggcttcaccagtgaagtaatggttcgaaatagctaaacctttttcgtttataccatcaccaaatctataacgtcctacttttaaatttgttccaacaaaaccatattcaagacgcatgtctgaatctagatcaaattggtagtgataatggcgtggaacaatggttgggataccattaaattcaaatgcaaagtccattgttctagctaaataatggtaacgttgttttgtatataaagaaatggcagtacacatatataacactccaaactactgaaatttatctatattaattgtaatatagataaaaatgcgcttattgtaaacctgaatcatataaaagtttacaaaaattaatgcttataaaatcagtcatttttctaatatgaatatgttaaaatgtagcttgaggtgaaaacgaatgaaatggtcagaggta

SEQ ID NO: 913 - DNA, 1264 bp, Staphylococcus epidermidis
  marker
tacactttgcccgtttttttctctaccttcattatcgtctatacctaagaataaaattgatataggttgtttttcaggatcaacttttgaatctcttaaagtagactttcgttgagaatctttagtgttttgagatgactcaaatgccgattctgaactttgatataattgagtagcaaaaataattggaacaacgaggagaccaaaagataataatattaaaaaatattttataaatttgttcattgttagtactcctagttaaattttaaatatttcacaaatgattgatacataaaaagttatgatttattaagtacactatagccttaaattgtattactttattaatcaaattacaactctcatcaacattttattgttacaaaatattattgacgaatgattataaaattgagttaaacaacttattgtttaactcaattttcatatagtaccaaagtactatagatttatttttaaataagtgtattatctaattaaagtgatttctttatagctttaagttataataaactttagcttaatagctacaaatattgttataacaaggtgcagacggattagttgttcaaaaataatatctgtaagtaatatttctgattaagaatcttaaatttgataatcaaaaaagtatttactaattaatttagtagttagatatattataacgttcttgaacaagtatttgtattcgttgacattatgaatatcataatattagttgcattgtaattcttaaaagtaactggatgtgtcacagataaccaaagtattattaaattacagttaaagtatttaaaatcttttaatcgtttaagtgtagtcgtgtgattaaataaaaaagtcattatcattttagctaggaaaatatataagcatttatttcagatatctcatcagataattatttattcaagtattgtgggtattaattcttaaaaatgataacgaataatataatatattgatatatgatgtgaatagtcaacaaaattttaagacattaaagtgtgaggcaaacaataaagatgaaattaaataaatttaaaatcgtattttttattatcgtattattaactttagtcgtgtcaataggtatattaggtgttgaatggacaagacacctagaattaaaaaaacaaacgttaagtcaagaaagtggaaatacgaattatatagaaaagagagataagactgttgagaaacctaaaaaaataaagactaaatatgataaaaaaga

SEQ ID NO: 914 - DNA, 1253 bp, Staphylococcus epidermidis
  marker
ttatattaatgtctttagtaatcattttgaaattagaatatctttaaaagtgactactttatttaatatatttttgtacaaataaagtaaatttgaaactttcaatgacactcctttaactttataagtatgtcttatttatattggaattaattgaagtcacttgctttattaactataaaagagaacctcaaatttttattacgattaactttaagaacaatgtagttctctgactataaatgattgggtcacaaagctaaagataaagtaaagcactatagttaattaacttatcatgattcttttttaaatgatatgaattatccaagtgcaacgtcaagaatcatcataattgtaaaaccaatcattagacttaaagttgccaaatcagtgttgttacttgattgagaatcaggtatcagttcttcaacaacaacgaaaatcattgcacctgcagcaaacgctaatgcataaggcaatataggatttaccactaaaattgctgcagcaccgatagtagcgaaaataggctcaacaattgctgaagcttgtccataattaaatgctttccaacgtgttgcacctgcagcacggattggcatcgatagtgctgcaccttcaggaatattctgtatgccgatacctatcgctagaccaatcgcacctaaaaatgtagcgtgactgttgccagatacaacaccaccgaatgcaactccgatagatagtccttcaggtatgttgtgaagtgtgatagctaacacaagtaatgcattttttccaagagaggtaggcacaccctcttgttgttggtttttatcttgggcattttggtgaatatggggaataatataatctagaaccctgataaaaacgccaccgagaataaaacctattgctgcaggaagccatggcatagcactattttcactcgattcaattgcgggttgtaacaatgaccaaaaacttgctgctatcatgattccagctgcaaaaccttgcatcgaatttaagactttatcattcactttcttaaatataaaaactgctgccgcacccaaagcagtaagtaaccacgtgattattccggctataagcgcctgaatatagggtggtgcgttttggaataaatctgacatatctaagtctccttatatcatttgaatctaaaaaggtgtataatatatagaactgaatttagcttaacaaaatttttttgaaaattcgatagttgacaatttccagtatttgaa

SEQ ID NO: 915 - DNA, 1239 bp, Staphylococcus epidermidis
  marker
catttatcagttcataacgaacaatgttttatctaaacaacatcacattgtctagataaatattaaaaccgtgtggtagattaatctgaccacacggtttttttatactttacacacatattgtcctttgattattcatcgaacgacatactactttcgataatttttttaaatacgcctagttgataagatgaaaaatcgttttgagcacttaagaatggcgctgatgcaacttcaacgtatttatgattatcgtcactatctaattccgttggtgaaaatagataataagctaagatggctgaggaaatatcattctcttcatcagaatcactgcctaatattgaaacttgagtgtatggtttccctttatatttcgtctgtaaaataccatatgatgtcgctttaggatctttcaaacgcgttaaatcttccaatgtcttaactttttctaagtctttagctttaaccattttctttttgtctaaagcaaaaaatccaggttgaatatttgtagctactaatttaccttctttaaatgttgcaagtatttgagcgtaggacataggttgcttattttcacctgtttttttaccatctggatctacatacatataattgatatgcttaatatttttttccttacttttcattcgtttaatctctacaccttttttatctttaaagaacttattaacttcttctatagatgaccctttagattcttttgtgtatttataatctgcaagtgttaccttatccactaattttttatagtcttcccagccttgcaatcccgttttgtttgtaaaacctttttctgtaataagtgcatcgatttcattaagaactggcttttgtttaagatccttagcttctttttctagttctttatattcgtcctcttttgtatattcagtcgccacatccgtttttttctccgaactttttgatgatgacttttcattagaagattgatctgaatcattgctattcgaacatcccacaagagcaattgacatcacaattaataaaattccccaaaattttttcatattctatctccttttaatttttatatacagagaaataacaattaaatattacttagttttaaattgctatttataaatttataatacactatttaaggttttgaatatatagttatctatacatatttttatttattaattttaaaaaatgaattttcattaattatctatcaattaaagaaaa

SEQ ID NO: 916 - DNA, 1129 bp, Staphylococcus epidermidis
  marker
tttctaatacacgattaggtattggccagagcgaatgctctggtctttttttgtgccattttatttgttactattttagtaaaaaaagattgttaataaataggagatttgaatatgaaattcaaaaatatattatttgatttcgacgatacattagtggatttttatgacgctgagaaaaaagcgttttataatttagcacagaaatacaatcatcagccaactcaacaggatttcgaacattttaagaaagtgaaccaagcgcattgggaagcatttcaacaaaataaattgactaaagatgaagtgctgtcacaacgatttattaattattttaatgactatcaaattcatgtaaatggaaaagaagctgataagtgctttagagctgaattagcaatggcaccagttaaattatttgatcatacattagaagttatacaacaattaaaattaaatcattctctctatatagtaaccaatggtgtaacagaaacacagctacgacgaattgctcagacacaatttaatgaaatatttcaagatgtctttatatctgaaaaagctggatttcaaaagccgatgacagagttcttcgattttgtgtttgaacatatcggagagaataacaggaatcaaactctaattgtgggagattctttaacgtctgacattttaggtggtaaaaatgctaatatatcaacatgttggtttaatattagacaaaaagaaaaccatacgtctattcaaccggattatatcattaatgatttatcagaaatgattcgcattgttgagtgaatagaagagataaagacaattgaagaagtataagttgagccaacacttgtagaatttatcattacaagtgttggctcagtttagttgatatatattattgttacgacattatggattccatattaagatgtcgtgcccctcaggatttttggtttctacatctttaaaaccctgttttaaaaagaattcttttgagttatttctagcaatagctttaattggttttttattttctttagcaaagtttaatagttgcttagcatatccacgtctttggtacgtatctaatacttctaatttccaaagaagaatatagtcattgctatta

SEQ ID NO: 917 - DNA, 1059 bp, Staphylococcus epidermidis
  marker
tagaccatacttacgtgcagcttggctaaatgcagcgccttggttttcaagtacacctttgccttttaataatttattgagagcttgtgctgacaagtattgtggttgatctaaacgtaagaattgatattttaaggatgaatcattagctaaacgctttgtatccatagcatttttaatttgactataattagcatttgaccatttcaaaggctcattttgtacttgtggtttatatttaagacgagattggatatttatcgcgttatttaaagtcattccagtatatgcatatttaattttttccttaactaagtcagttgattttatccaaacatatttaccgtctaaaagttgaccatagtaccatttaacgccattaatatttttttgcttaatgactgtgaaagtttgttcataatatggttttaaagaatatcggtttgcttttgttggatccatatagaaataacttttactattattgataacaaaagtatagttatatggtgttgattgagcgtcagtactgttttggattaaatccttagcagcaatccatcctgttctgttattgactgtaccgtatagatataaatctttaccaacgtaaacagctttggaagcattaaatgcttgattagctagcgtattaggtgctagtaattgttggtttttagtaccccaagcaatagaatatagaccattatttgtaggttttactgaatatttacctatagactgagtttgttttccgatattttgagttgtcacatcattaatgtttacccatcctaatggagtattacttgttccatcttgaagtagtacatacgtgttattaccttgagtacgttgtttattgataaggaatgtacggttagcgtatttcgtaccacttttggctgttttatcatatacagatgctcttattccagaattattagctttcacttgagcaatttgatttacagtttgtgtagatggttttacttgtttaggtgctggtgttgattgagtagacaaagcttgaacttttgatggtgcagttaaatagta

SEQ ID NO: 918 - DNA, 1000 bp, Staphylococcus epidermidis
  marker
gtatgcattcaataataaagaaactaccttgaaaaaagtaaagtatcatacgatgacaccaccagatagtaatgtttcaagatatactcctgataagaacgaattaaaagcatcattaaatcacttttttaaagaaatgaaggaaactgtacatactcaagatgtttatcaaatgtgcgtcaatattattaatcaatttgattcatggactgatatttttaagggattgatacatgaagtgtttaaggattatgggattttatttattgatgctcaataccctgaattaagacagatggagaaaccgttgtttaaagagatattagaaaagaggaatcaaatcgatcaatcttttcgtgaaactcagatacgaaaaactcaacaacaacttccatcaatgatacaaacagagacaaacacgcatttatttatccatgaagacggaatgagacaacttttaaattttgatggcacttattttaaactgaataaaactgagaaacgttacacgaaacaaaatttattagatattatagaaagagagcctgaaagaatttctaataatgttgttactcgtccagttgtagaggaatggttgtttaacacagtagcatttatcggaggcccaagcgaaatcaaatattgggcagaattaaaagatgttttcgatacgttaaatgtagaaatgcctattgttatgccaagattaagaatcacgtatttgtatgctagaactaaaaagttattaaaacaatataatttatcgatagagtctgtcattgctaatggagtagaacaggaacgtcaacattttgttcgtgaaaaagcatcaaataattttataaatgaagtagaagaaatgaaaattcagcaacaagaactttataacaatttattcacctatgtggaaaataaccatgacaaccaacttcttttagaaaaaaataatcaaattcatctcaatcagtacgattatttaatcaaacggtacttactgaat

SEQ ID NO: 919 - DNA, 979 bp, Staphylococcus epidermidis
  marker
tattgtctgtagttgctgtttgaacgcctttgatgtgatttattttatttttatccgatttagataattggttcgtaacataaaatgttgcgacattactactttgttctattttggattggtccatcataacaatgttactatgagaatacatcgtgttttttaatatacctacaactttataagttgtatcgtcacctttgactttaactttatcgtctaaataaagaccttctgcagttagtttttcatttattgctatctgatttccatttttaggataatgaccagatttcaaatttggctgatgatttttcacgctatttatagccatcacgttttcttcgtttccattgattttgaaagttttacctgccattttaaaaggtttttcatcaataatttttgaaatattgtcttgtttacttcgtgatagaatagatttttctaattgtggttctttcattttttgaacaacaaattgattacctttaatttgatcaaatattgatatattttctcgtgctaggccttgagcaagtccactgataaataaaaccataatcgccattagaaaaataatgaacatgattaatataaatctgaacttataaaatttaatctctttccaagctagattcattgatatcctctcccatttctttatatgttaagtttaagaggaaaatatgaactcaatatgaacaagtgtgattttgttcataatttgttttaacgtagtataatcattaaaaagtataggagcgtaaacatatgattaattgcttaatcgtagacgatgataaaaagttattgcaatatgtttcaagtcatttagaaagagaaagtattcaaacacatactttcacaagtggagaagcatcactagattttcttgaaaataaaaatgttgatattgcgatagtagatattatgatgagtggaatggatggttttgagctttgtcagactttgaaag

SEQ ID NO: 920 - DNA, 966 bp, Staphylococcus epidermidis
  marker
attcaatcccctttgcaactcattattttccataacttgaccccatctctaaatctagattgaatttttgataatcttatttccgtaattatactacaaattgacaaaattgaaacaatatttttacaattctgtaaaagcgcttacctatcctgctaagatgttttcttgctttttgataacactcatattaaaatctttttgataatagagattatagagcaaacgaaatagttcagtacacactcttatagttgatttaaaatattaacagcttaccacctagctatataacacaaaatgattgttaaaactatatacaatgtcatttcaaatttaacttaaatcacattaccattttacctatgtctttgctcttaataattatttaaatatgatatactttttttaaatagtaaaggagtgctcatatgaataaagcgcttgttatacgtgcaatcaaattttctttaatatttatgactgcatttttaattcttaatttattgactatgaaagaggcttcaatatcgtctattattgtacgaactgtcattgcagctattgttttctttgtcatttatatcattgtatttacaattttaagttcgtcagaacgtaaacttatttatggtacaactttgcctattgcgctttttatatgccttatattcggagcaatttttttcactccgcgtataggtatcattgccggactaattataggtgtgtttgctggtgtcatatgggagttcttaaatagaaaaaatggaggtcgctcatcttgactattattatcggactcattgtaattattttgttaatcattagtttacttccaaattataaagcaatggtattagctaagcagcaaggccaaaaacctacacgatatactattatggtaggcattgatttattattaattatacttattatagtaacattagtattaaaattgattat

SEQ ID NO: 921 - DNA, 933 bp, Staphylococcus epidermidis
  marker
gttaacttatttattcccgctctcactaatccctcagctaagtgtgttcctaacgcacccatacctactataagcacatgttttttctcaagtagactttgaccttttaaaccaatttccttaaacaacacttgtctcgagtatctttcttgcattagatctctaaacctctctttatattttgaatatacaaattattgttaaaattaacagataaatagcacttcttactatatttgtatacaatcttcaattgttataatctcatgcgccatttgttgcgcttcataatttgaatgcgttacaaatataataggaatttgccatgcttcgaatatttttaaaattaatttgataccttcgttttttgttttatcatctaaacttgaaaaaggctcatcaagcaaaatcaaatcgggtttcgtacttagcgcccttgctaaagcgacgcgctgagcttcacctcctgataaggtcacaggatacttttcaagtaaatgctctatttttagagtatgaataagttcattgatatgttcagaaggtttagtcataaacgttatgttgttataaacattcatattggggaaaagttgataatcttgaaatagatatcctatacgacgttgttgaaccttaacattcaaatggtgtcgtgaatcagttaatacacgtttaccaacctttatatatgaataatttatagctttcaaaccggcaattatatttaaaattgttgtctttccaattccagatggtccctgtatcgcatatatcttagggtgttgatcctttatatttatattaattttcgtctgattaagaacaccattcactttaattgtgagcatttaatcaacctccctaaacgtatcacgattaaccagatttatggtcgctatgacagttaccgcaaacgcaactaatacaagc

SEQ ID NO: 922 - DNA, 927 bp, Staphylococcus epidermidis
  marker
atagttatttattgaagaattaacctttggtgtatatttcggtaatgatgatgttttttgactagatacagaataaactgttctcggttgagcagttgcactaaatggggtgaattgctttgtatctatagtcgcttgattagatgccgtttctttttttacagtattagttgttacacgttgagctggttctttatatttatatgaagtagtttgtttagatgtagcattcacattgtttaatgagataggctctaaatggtctgttgagctatcatcgtcttcatcatcgtaatcgaaattataaccagatgcgtttgtatttgatactttaggtgtagcagtttcattttgttcagaagttacttgctgacttttttgttggctttcattatcattagaagcagtttgagtttcaattgcttgattttcggaaggttgacttgcagtcatcttcttgtcttgttgttcattatttgcgttagctcctaaatctttctcattttcttttgctacagattgtgtctcctgtaattgatttgtatcagtggatgttttatcttcttgtgtcaaatcatttgtttcttcttgttgattttttgtaacagaattcgtttgattttgattcgcatcatctgttgataaagattgttgcttttgatttgatgaaatttcattataagtactcatttcatctaatgatgcatcatatgtagtactttgtgtgtcttgtttaggttgaacttgggtagggtcttgatatgtttgtgtaccagatacatttgtagttgattgtgtaacttcgcttttagctttttctgcttgtttgagggcagtttgatcatctaatacatttttatgattagactgattctgtggttgttcagcagcatttgcttgatgtgcagtaaaagctgtgccaaataa

SEQ ID NO: 923 - DNA, 902 bp, Staphylococcus epidermidis
  marker
tactattttagacatactacttaccccttttcttattgattaaatatattttacgagataaactgatatttaaaaaggttcaatttgtacataaagataggggtcagttaattgaaagtaaatcaaccactttatttatcgttatatgaaaagttaaaaaatcaaattatcgaaggtcaatatcaatcaaatgatagatttccatctaaacgacagttaagtaactatttatctgttagccacactacaatagaacatgcatatcaattacttgtagatgagggtttcatttattcgaaacctagatctggctacttcgtttccgatatagaatcgttgccagtgatacatcgacaaacaaatcaattaaacactgataacttagaaaagaagcaacgacaatataaatatgcttttaatttagctgaaattgattctgaaagttttcctatgcacatttttagaaaatatgcgaaagacgtttttgaagaccatcagctatcactattacaacgaggcgagcgtcaaggggaatatattttaaggcaacaaatttcacattacttatttaatagtcgtggcgtcacttgtcacccaaatcaaattattgttggatcatcaacaagccagttactcgatatgataaccaatttactaaaaaaagaagaatttattattgaacagccaagttatccacctattaaacatacgcttgataaaaaaggtataagttatattcaagtcccagttgaacaaaatggaatacaaatcgaccctattttaaatacaaataacaatattttgtatataacaccatctcatcaatttccaactggttatgtcaccaatttaaaaaaaagaacacaattaatcaattggtcccatcaagctaagcaaagata

SEQ ID NO: 924 - DNA, 899 bp, Staphylococcus epidermidis
  marker
tataaattttctttataagagcctgagacacaaatggttgtctcaggtatttttatgtactgaacgtagataactcagttgtcacgttgtcataaactatacaataaacatattttttattcctaatcattatctactatttctacagttacaaaggtatcaaatatgattcaaatcttatctaaatattttaaataaatcgaagcgagatctgtaatcatactaaagtcattttttactgacacgatatatatctatttaatatttagcttttaatatgtttgaaaattcattcatgttcactttcgtataaatagcgaatacaaaagtatttaaaatttgttttataagaataatgatgggaaatgtttacacgtttcacttatgttgaaaaaggttagtacatttttgtacaatatatataattattaagaggtgggtgaaagatgaagaagttaataattaaagttattggtgttatattattagtgacatttttaatttatctcttttactcaccacgtttaaagtttgatgttctagagaatcctaataaaaatagcaaaacgactaagacagaacaatttaaacaggtgaataaggatgctgagaaccctaaacctaaagaagggatagggacttggattggaaaagatattaaaacactaacgcatcattatggacaagctgatcgatcttatccatataaaaatgggttaaaaaattatgtctttaaacagaaagatgaatattatattgtaagtactaataaaggaacaatcacatcagtttatgccacaggtaaaggtgtgaaagtgagcccacttaaaataggtgaaagttcatctcatatttttgaagatactagtattaatccagaaccaactgtcaaaacgaaa

SEQ ID NO: 925 - DNA, 880 bp, Staphylococcus epidermidis
  marker
gcgtataagttttctcgagtctttttcaaaataaacacgtaaatgtagtggtgaatttcctgggtaatatcctgcatgagctccttgcttaacttcaaccatatcataatcgaaatttttaagttcatttggtttgatgccaacacttgctaatgtatagtcaaaaaatttcactatattatttcctagataacctttaaagtgaatagacgaatttccagaaagttgttcagctataatacttgcaccacggtgtgctccccaagcaagtggaacctgtgccggtaaattcacatgacgataatgtgaagtaataacatcacctaatgcataaatatttggtatatttgtttggaaattatgatttactgggatataacctttatcattcagtatgacgttagatgatttaataaattgtgaatttggatgagtacctacaccttcgataataagatcaaagttttcaactttaccagatgtgaatgtaacttcatgtccatttacgtgactaatttcttcgttaaatctataagtgatatttctcttttctatttcgtcgatgatgggttgattcatatcttgatccatcagtttattaatatttgtagagcgatgaatccatgtgacatccaaacctctatgatgtaaattttcaaggacttctaaagagatgtaacccgcgccaacaacaagtgcacgttgtgctttggtattcgtaataaaggtatcaattgtttcagtatcttcgagatttcgcacagtaaatgagatatcactatgagtgtttaatcgatttgcagatgcgccaggacttaaaatcaatgtatcgtaactttcttcaaaagtttgattagtttgatgatttaagacagtaact

SEQ ID NO: 926 - DNA, 843 bp, Staphylococcus epidermidis
  marker
agtacaaactactgaagaagtgaaaatcatttctgtaaatgatttgatgacacagcatctcgatgcattgaatccgagagcgattgtcatttcacctggacctgggaaacctagtgattatccaatactatcatccgtattagaaatatttcaccgtcacgttcccattttgggcgtctgtttaggttttcaattaatcattgaatactttggaggaaacattattcataatgataaacctattcatggacatattaccaagataaggcatagcaatgagggtatttttaaaggtctaccatcgtattttaacgtgatgcgataccattcacttatggctgacccctctacaatacctagcgcattaaaagtcacagctctgaacaacgagaatgttattatggctgttgcacatcataagtatcctatttatggtttacagtatcatcctgaatctatactaagtgaatatggtcacgaacaattaaatttattcttaaccgaggtaggggttaaatatgcacattgaatttaagtatcgctattatgaaaatgaaaaggactatgaagactatcaattagaaatggataactttcaagattctaaaattgcatatcgtcttgatgaagtaggggatgtcattcactttgcagaacaagaacaacgtaacggaagctatgttgcactttatgttacttatgaagcagcacctttttttaataaggaaatggtggtcaataatgtgaaacaatcccatatttttgctgcagcttattcatttaaatcggtcaattcgataaaaaatataaaaaaagtaatgcccaataaaaatcatataaaaa

SEQ ID NO: 927 - DNA, 822 bp, Staphylococcus epidermidis
  marker
catataaaacttgtataacatagtcaaatacctgagacattgattatcaatgtctcaggtattttttaagcagtattttatcaacttatacagtgtagaaccatttttctttatataagattaaaacaatacatcgacgctctatgaattatagatattaaaaaattgagattaaaacgtattaataaacgctttaacctcaattacaactttaaacaaattcaattgttgtggtagttttctcaataattatgtcatctcaaaaatagtgtcaaaagaattcgtcgtgtactgtcatgcatttatttcgctacataacaaatacatgatatgtacttaaaggatattaacaaacttgaaacgccttatgatactatagctacaatttatatcgtaagttaatgtttcaactattatctacattccacttacaataatatttaaacttattttctacttatttttttaattcctatacctgtaaagccataaattattgcaatgaatgcacataagtaacatgggattgcccatataaagaactgatcaactgaaacattaagttggtgtgcataatatataccagatgtgccccatggaatgagtggcaataccattgtacttgaatcttcaagtgtacgagataacactgactttgagacattcatcttttcgaacatatctttcataagtacgcctaccataataataactattgaagcaactccagctgcaaatactagcataatactacaaactacagttattaatattagtgttccaactgactttacgcctttagctattgtctctaaaattacg

SEQ ID NO: 928 - DNA, 814 bp, Staphylococcus epidermidis
  marker
ctcacttgcttatgtttacacaaaacgaattgctgtacctataggcatacacatgcttatgaatggttcggttgtattaactcaagttgtgggtggagattctattaaaaaattgcaagaacaagcaacatttatattccatcttatattttaaaataaaagcatctcatcatgtataaattaattatcatacatggcgagatgcttattttattacttttttcttctaaagatatatagtccagtgactcctagaaaaattccaattattgcaatacttaacgataaaagacttcgatgtattttctttttcttatcataatctttggagtgtccatcattatttgttgttatctcatctgcactatggtttttgaaggcgctatgatttttatcttctttatccgtaggttttttaagttctggcattgagccgatttctcctgtaattaaagctaaaacctgatcatctaaattttcatagtatttactagaattaagtggattaaaatattgaaatctgaaatagcttgtccctttttgtaatgaatttaaatattcatttcctctaaatgattgctttctaaacaagctataaatgtcactatctgtcacctttccatctaattgattcaaattttttacttgattaatcaaaaacggattgtacttataagcacccgtggctaattgtctgaatctgctaattaatgaattggtattatcgctactattcattctatgttcggtattattttgagatttaaaaaagccatttttgttccatataaattgatttatattattttgattt

SEQ ID NO: 929 - DNA, 812 bp, Staphylococcus epidermidis
  marker
gcttacacatttacaacgattgcttacacaacttgaattgacgcaaaatgaagaagagaaacaactatgtatcaatgaaatgtttgaaatcactaatcaagtaagtgaactaactaaggaattgctacttttatctgaattagataatgcttcccaccttacttttaacgataatgttcatttaaatactttaataaaggatattattagacatgaacaatttcgaactgatgaaaaagatttagttatgtttactgaattagaagatttgtatttccgaggaaatgaaagactattacatcaagctttcaataacctcatcattaatgcaatgaattatgctcctcaaaatagcatgattaatatcactctaactagtacaaatcacttgattatatttaatattgaaaatgatggatcgattgcagaagaagatgcgaaacatatcttcgatcgtttttataaactgagtgacgaatctagtagtaatggtctaggtctagccattacccaatcaatcattcatcttcatcatggtagcattactctcacttcagatgataaaacacaatttattgtaaaactatttatttagtaagtattctttaaactatcaattggattcataacaaaatatgatgaatttaaaacatttcattaaataaactatacaccacatataaaaccaccattaaatgataacttatttttaatcatttaatggtggttttttaaatactactttacattcaagtatttttttacttcttcgtttattgaatggtacatatcttcatgctctgacaatttta

SEQ ID NO: 930 - DNA, 791 bp, Staphylococcus epidermidis
  marker
tagttgatttgacgaagttaaccaaagcttaagttggtgtgtaatagcttctatatcatctttaacaattcgatagtggttaatatcaacatgattctcatgttgatttatcaaagattgaatcagttgaccacctttatcagaatcataatctctcgtatccgatacagtcaaaattgctacatgaatcggtctgtttaaatgaatattctgatgttgatgtttgtgcatgtttattcactcccttatatttaaccaaatagttgatgcattaattgaattgcttttttaggttctgtcgttccatgtatcaaaaatctacctccagaaaatgcaacaattcgatgttctctaaacctaaacattgtcatatataaattcgtgcgatattgaatatgatttcgctcgagaaatgatagtaatatttcctgagaaatatcagcatttttatattgaacagtgtctcttccacataaggtcgcataatcttgttgatgttgattaaggtgtggatatgttggagcattaccacaagttttacaatcttcattttgcatacgactaaaaccaaatgtataatgatctcctgtccaaatatccccgtaagtgaagtgtttattaaccttattaccagtcagcaacttcaatgcatcaacgagttgtaaactggttgtcattgttacagctggttgaataactccaaccgtatcacatgttaaattaatagatggtaattgaggcattaagcaattaaaacacggtgtttcaccaggaataaacgttgcctgaac

SEQ ID NO: 931 - DNA, 790 bp, Staphylococcus epidermidis
  marker
ttctttttcgaatgattgtatagtaagtttggtactacctgtgtctgttacaatcaaatgagtttttgtattgtaatttgtaagttcagatagatatttaattgtttgctcaacaggagttgcaaagatgattatatccgctatctcaacagcagtagcataatcattaactttttgatcaataatacctatagaaagggcttcatcaagttgtgtgtagtccgaatcgtatgcaagaatattgaaattactgtaatgatattttaaattactcgccaagctaccgccaataaggcctaaccctacaaataaaatatttcgcatagagcgcctccttgtttcagaattttcagaataacaatattgtatatgagtcatttcaagtattcaataacaaatataacttatgtatgattttaagatattaaataaagaaagatttatagtttgatttcagtacattttgtataggaaataaagataaacacaacaaatttttcattttcattttaagctagttgacaaactggaggaggataggtattatactaaataattagaaaaatcagataatttgattgatagagtaatcattatattttgtagcaagcagaaagctaatggtagatgtaaattagcacatgataatagatgaaatgggctttcaaattttaacttaatcattaaagtgaacatatatgttaactaaggtggcaccacggtaacgcgtccttatagaatgatagcgttattgtggtttttttgaagcaaagtgaagtaactaaagttg

SEQ ID NO: 932 - DNA, 756 bp, Staphylococcus epidermidis
  marker
ttcaagagcatcttgcttaatatctttataattattgtttagtgtatttttaatccaatgctttaattccttttcagacatttgttcaattttcttaagttgtgcatttttcttcaacgttttcgtgagttttttgcgctcatctagtttaggctgatacacttcaaagataatgagattttcaccatcatatttttctaaaaattttataagctcgtcagaattgtgatttaaatctttagaaaatttttctcctgtaaaaacatacgagttctttacaacaattgcttttttatttgagaaaaaaggcatagtaagtgtctcttcaataatcggagttaggtcactctcatacaagttgtattttacataattaaagtcatctatcttttgtcctagataatcatttacaatttcttttgttttcttttcgactaattctggtacttcaccgtagacagtgaagatattgttgctcatacgtacaccttcctctatatatcatactcatgaattatatcactttacgatacactttctctagctaaactcttttgatttaaattatcacggtagactatgtaaacttcttcatctaaatttatagttaattccccgttgtcttgagtatcaaaaactttactaccataatattttaatctttgaataacatccaaattaggtaaatgatacttattatttttaccactagatataagactgattttaggttctatatctttaataaataattcc

SEQ ID NO: 933 - DNA, 749 bp, Staphylococcus epidermidis
  marker
caaattgtatgtattttattgatacccaccagtagatgtacttaatcattcgttttaaattttaataataagtttagagatatttgtatgaatgaaagaaaatcatataaaataaaattactatagtgtacgaaatgagggatagaatgacccatgtagatattgcagcgacaattgcaccagaagacaagctttctaaaactttactcaaagatataaaagtaaacgaagaatcaatagatatcattgaattgcgcattgaccaatggccatcatttaataaggcattattaaatgaagtgattaagcaattaaaaatattccatttgaaaatattagtaacatatagaacttcagttcaaggaggaaaaggagctgtaaatgagcaagagtatttaaatatactaggtgaattaattgagtgtccacaatttgatatgattgatattgagtggagcagtgccgtcaaaattgaaaaatatacgcatcttgttcaacgtgcacaacaaaaagggctcgaagttgttctttcgcatcataattttcaagaaacacctgctttagatgaacttaaatttatttactttaaaatgcaaaaactcaatcctgagtatttaaagcttgcggttatgcccaaatgtcaagaggacgtgttacatttattagaagccatgtcactcacagcgaagcacacaacatgccgaattgtcggtatatcgatgtctagtttgggtaaagtcagccgaatt

SEQ ID NO: 934 - DNA, 733 bp, Staphylococcus epidermidis
  marker
cgcattaatatgatttgtttcaattataatctttaaggcttaacactgtatggcttttaacatatttgtaatgtaattttaacctgtgcctcaaatagaaatattgtttttttatgctgggaacattgtcaaatcactatttacgtttattataagcttgtaagctacataaagattattacaatttttaaaattgctaagtttgtatatagaatgtaaatcaatttataaaaacttattcatactaatatgatttatattttcttctaagaatactttaccaaaaggtgagtaacctagttttaagtaaaagtctcgagcttgtaattgagcattcatagtgagttcattgtattggtgtttttttgcaattgtttcaatagcatgtattaaatttttaccgtacccaagaccacgataccacttgatgattgctacacgttcaattttacaaatatgagtatttaaaggtctaattctagcagttgccataggaacaccatttatatatcccactatatggaatgagtaatcttcatattgatcaaattcattttcgagtggtacgccttgttcttcgacgaaaacacactttcttatttcaaagcaatcatctagcatcgtttggttttttgctatttgaaacacagtatcacctccattttcactggtttttccttaaaaaattattttaaccatattgaaaatgaaaatttataaaaaatggaataaa

SEQ ID NO: 935 - DNA, 728 bp, Staphylococcus epidermidis
  marker
tttgtgaagtcaatgcgattagtataccaaacattgaaacggtaattgttctcatagatagatgaagacctcgtacaatactttctgtacttatttgcaaaataccaaattttacaagcatatgttctccatcaccatataaaatcataaataatgatgacatcaaggcaaagagggttgtaactaatataaatattgccgttattttaaattctgtaccgttaaataaaagtaagaacataaacattaatatgacgatataaatcataaagtcgaagttatggataaatataatgaaaaagaataatgcgatacctaaaagtaacttagtaataatatttacatcatcaacgaaggtgtggcgttttttccatctttcaaacaatgtgttcaccttccatttctttaagacacccatcttccacgcgtaatcgtcttgttggatatcgtttaataatttctggatcatgtgtcaccatgataattgtttgaccttgattaacgcgttcttgaaataacttaataagttgaaatgtattatgactatctagaccgaatgttggttcatctagtaaaataatctctgcctttgaacttaatgctgttgcaacacttaaacgacgcttttgacctgttgatatttcaaaaggatgatgatccttaacttgatctaaatgtaataattttaacagatccatggtttcatcattcgcatgcttaggatctaa

SEQ ID NO: 936 - DNA, 702 bp, Staphylococcus epidermidis
  marker
atttgaatcagatcctttaaaagttgcttttataccattacgtccaactggtgtttctatggtgcatgctaattggctcaattgatttacaataaaatcatgcgtacgtttttcctcaaaagaaagttctgggtattgatgcaaatatcgtcgtaattgcaccattctcttttctttattacttgctaattgaaaccaatcaaacacatgtatcacttcttccatcttaattattgatattagtatatcattattgttttagcttaaatagactttgttttgttattaagatatcacacgttttttacactatctattaagatttggaaacattaaaatgattaaatataaatgaatagccccataaaaatacaacacaaatcataatacctcacttaaaattaataagaaaaaatcgtccataaaatttttgttattaactgttattatagaagataaagtttatgtaaaagtattcaaaaatatgtagaatactaaaatactaggtagtgatgtgaattaggcgtatttctaagaatttaattggtatacgacattttaatattatatgaagttctggctaaaggaatattagaattagtaattatagtttattagaagtggaaaaaattaaaaagtaagaaaattattataaaataataccttaacttatatgtagaaatataaaattattatgatata

SEQ ID NO: 937 - DNA, 692 bp, Staphylococcus epidermidis
  marker
ttttaatctagattctcattattatgtgagtggattaaagaaagaaggtcaatgttttgtgaattctggtggaagagttatcctagctataggggaaggtccaacagttgaaaaagcacaagcaaatgcatatgaacatgcacgacaaataaaaagtgataatcttttttatcgtaatgatattgggaataaagccatcactaagtaaaattggttgttcaatttgaaataaagtccttcgttgattggataagatcaacgaaggacattttttatgatttctatttacattggaataaaatgaatatttacttttaattaaatatttggtgtatgattattagtctaattgtccaaaacggacatcatgaataccagtaattggaaggtatgatgataagacaaatgacaaagtaatgataattaatatacaagcaataaatacgatatctttatatgaaaatggtacccgatagtagtatgttctcggaccatctttaaaacctttagactccattgcaactgaaagttgatgtgcacgtcgaatattttgacttaataaaggtatgactaaatgattaagacgcttgattcctttatagttagatgcatctatcatttgataacgcatttttagggaacgtcttaattgaataagagaacttattataagtggaaccattctaatcgct

SEQ ID NO: 938 - DNA, 679 bp, Staphylococcus epidermidis
  marker
cctagatcctaatgaagactgtccttgtcgttatgtcgcacatcagtttattcatgcaaattatgatgatgagcaagctttaaatcagttaggtgaaaattctgatgttgttacttatgagtttgaaaatatttcgtctgaacaattaaaaaaactcactcagttatatcatattccccaagggtaccaagctattgaactattacaagataggctaaccgagaagcaaacattactagaagcaaatactcaaattgttccttttgtacaaattcaaacaaatcaagacttattaaaagccatagaaaaattaggctttccgttcatagtgaaaacacgttttggtggatatgatggtaaaggacaaattttggtaagaaatgattcggaattagacgaagcataccagctagttgagaagcaagaatgtgttgctgaacaatatcttgatattcaaaaggaagtatctcttacagtaacaattggaaatgaacaacaaacaacatactttcctcttcaagaaaatgaacatcaaaatcaaatattatttaaaacagtcgttccagcaagatctgataaagaaaatgaagcacgtaaggaagttgagaaaatcactcgcgcaattcattttgtgggaacctttacagtagaattctttattgataaagaaaataactta

SEQ ID NO: 939 - DNA, 659 bp, Staphylococcus epidermidis
  marker
ttatattaaagataagtatgatggagctgtcgtacctgctaagtaaatagcaaacaattaataatatttaatcgcttgtcacatgaatatacaaaaacacgtagatgattcagtataaaatcatctacgtgttttttgctattgaacctttaatttttaactcacttttgttatacgttttaacatccataaacatttttctgtgattatagttatctaacaatgactataattcactagccatattttttgaacaggtagttttgtaaaaggtaagatatattgtctttatacgcacaacatatctataattatttaaatattatcacggtataaaataccaacacttacaccgctatatcccatttggtaatcaaatttgataatttcaatttgtggatgtgattttaaaaattgatttacttttttatctaaccctttctcagtaatcgctttaatagtaataaatttcataaaatataccaacccaacttataattattttatattcaatatactataatctactgtaaatttatagtttctttcgtaaaatcatctttatgagaaaaaaattcataaaagatgtttagctcataaataagagggtaacaatattaataagttaaacataaggaggaattttaaatggctgaaga

SEQ ID NO: 940 - DNA, 641 bp, Staphylococcus epidermidis
  marker
cttataaatcaatgtaaagtttggatgatgtatcgtattttaatgtgaaagcattattttaactgtagcaaggataattattttttatcttttatgaagaaaacaccttgccataatataaaaccaatgagtaagctataaatgattaaaaagacataccaaaagggcgttaaaatcatcgttgatatgagagataggataataataattgtacctgttgtcattggtcttttaattttacgaaatagtgaaagacgttcaacttcgtctattttgaaagtacctacaaaaagtaaaatcgcccctattataaatatcgtgggtgataaatatgggatggacatgtacaccgattgtgtgctcgatttatctgtaataaattgcaataagcttataacaatggctagtattatagcaataaacttttggtcagaaattacaaaaggatatagcttgaaatttaaatatatttgtaaaagtgtccatatcataaatagcgtgacggtaaacatcgtaataaaattgaattgattaatcgcaaaaatatcaatcatgctattgattaaaacagataataatatggagctaaacttaagctgtctgaaacgatgtcggtataaatcgaagccaagaattagcaa

SEQ ID NO: 941 - DNA, 628 bp, Staphylococcus epidermidis
  marker
cttattgcaatgattgttgcttattctttacagttgagagaaaaataaataggttaaatttgatttataacaactaatcattggtgaaaatacttaacttttcaaatcaatgattgtatttatctaactttatattcaatgaccagtaagaaatatcacagaaaggtttctatgtaagcaatacattacatttcatgggtgggatagtgaattcagaatgaatttcgtctcactctttttctgtgtgattcactaaagttatttgttaaaatgatgttgaaattatatggtgttaactgatttacgaaacaaaattatcataactaacagtgataaaaattaagagaggtattcatttatgaaacttgctacgctaaataaaggcaaagaaacaaagtatttaaaccactatccattaatagatgaagaagatttatttgaacatgatcatcttaaagaaggtgatttgataacactggtgacagagcaacaacaatatatagctactggatatattggaagacaacataaaggattaggatgggtattgagttataatcaaaatgaagagattaacactttgttttttaaacgtttatttgaagctgcattagaagagcgacaatac

SEQ ID NO: 942 - DNA, 607 bp, Staphylococcus epidermidis
  marker
gattctacgtgaacgatcagatgcatattcattaaggtagatagctgctcctaaaccaatcggaactgctacgattgtagcaataacagtaattttcaatgtgccgatgatgagtgcccaaattccaaattctggtgatgaaccagttgggttccaagtaccagataaaaagaatttagataatggcactcgtgtgaaaaacgtaatcgtctcggttaaaagtgtaaataaaatagcaattgtagttaatatagatatagctgaaataatggctaaaataattgggacaattttatcacttagcccgccctttttagcattattcttagctatcatttctctcacctttgtttgtgaagccatgtaaaaccctctctcttatctcccaaaataatttaaaaaaaagagtgggaattgcttttatgagaaaatgagttcattcatatttaatagaatatttactcattatctgcaaagctgaaaagggttcgacaaagtggcacattgaccactttgtctgataccctttcaaaaattcccaaccctaggtgtttattaccttaatattcattatttatcttctgattttttgtcgtctttcttatca

SEQ ID NO: 943 - DNA, 597 bp, Staphylococcus epidermidis
  marker
accaaactagggtttaaaagagctattattccacagacaaatattggaggttggacattcccagaaggcatccaagtcgttggtgtttcatcagtacatgaagctttgaaatatgcattacattcaaaacagcgataagccatattgttaagccatactaggatataacatcaatggaaggaggctataaattgaatataacaaaagcaattgttgtagcaatctatatcattgttggtgcagcacttggtgttataattatacccgaagttgttacagatcttggcattcatcaccatgcggttatcactaattattatgtagatggtttcatagggatcattatattttttataatatttggattgttcattaataaagtaacatatgcttttaaacaatttgaacaattaatcatgagacgtagtgcggtagaaatattatttgctacaattggtttaattattggtttatttatttcagtgatggtttcttttatcttagaaatgataggtaattccatattaaatcactttgtacctatgataatcactattattttatgttatttagggtttcaatttggtctgaaaaaaa

SEQ ID NO: 944 - DNA, 593 bp, Staphylococcus epidermidis
  marker
gttctattcattcgaatgagttgtcttatcaaatcaagtgttaatttatctacaataggaacttgattttcttcagcataaactctaagttcttcgatttcagtatcaattgattgatgtaattgtgctaaatatttttgatttgaatccatatcattaaaacttcctttatcattaacaattacaaaaacaaaataaatcagcccatgtattgattatgttgatagttaatcaatgaaaatgactgattataatagtaattcttctatacttttatattagaagtaaatatgagtattcatagaaattaactttagacattttaccataattcaaagatttttataagaggcaattatacgaatatgtctccaagcattattattagtagggtaaatttaaataattctaatattaaaatgcctgggacagcattgattgtctcaggcattttgaaagtaatttaagatggtaactaagttgaaaatttaataatattaaactttccctctcaatataattccttgatgtaagagacctagaatctcaattacacttctcatacaacatcttttaaagattattcgttaatc

SEQ ID NO: 945 - DNA, 585 bp, Staphylococcus epidermidis
  marker
attttaataagccattctatatttcgacgtaaattttttaattaactaggttttcattttacaacgatataactttaacaaattattcgttattaatccatttaataaaaatgacttgaagtaaaacatcacacttaacatcaaacattgaaatgaatatttagataaataattatagtgtttcgtagtaactactccaacttaagatagaaatcaatagctattatatttagtttaattgtaaataaaaaaatagccctgaatgaaatttaaataacttcacatcggactatacatctaagtttcataacctagatctttattatctatataaaaatttgcttaaatctaaagtaaaaaaccatgcacctttgtatcgaacgcatatcataaacgttaccgaagtcgacagctaaatctcggctaccctacggcacatatgaggatccacttaatgctgcttccgtcaggacctgacatggttcatgggttcatattgcataggaccgaaatcttcaaacactacgtgcttcgggcagacttcacaaaaatacgtcctcaacaaaggaattaagtctcgcataa

SEQ ID NO: 946 - DNA, 578 bp, Staphylococcus epidermidis
  marker
taattcattcccttatccttaattaatttattgagtaagtgctcaagttgattacttgcacgtggatgattggtttctattttccctatgacgtgagaaagtccttgtagacttcttaattcatcattatttttataaacgataattttatcataatttgcttctttaaagccctcaactaaaatgatactacaatcaattgtaacagaattttctattatttctctaagcgattgtttctttttacgtgtcactgtttgctgtaaatgatgcccctgaacaatactttggtctgcgcccgcagcgaaatgtttcatgtggtcaacatcagatgactgtaattcaatttcttcaccaatatgcccgtgatgtttaattgttactactgaatagcctcgttcttttaaaaatgatatagcatggttcatcaatgtggttttccctgaatttttcatacctacaatttgtaaaatcatagtatcaattcctcttcaaaactattagattcggtcaaaatcacatcaacaatgttgcccgctttaaatccacgtgtgccaccaggaagcataatcatagca

SEQ ID NO: 947 - DNA, 573 bp, Staphylococcus epidermidis
  marker
gaccaagagagagcattggtaaactcgttgatgtcaaaattgacgaggcaaaacaatattctttaaatggaacatttatacaagaacatcaacgttcaatggtgacacaataatatgtatagtgaaaaagaaatcatacgaaaagtcgaaagtttagcagagaaaattggaaaactagaagttgttcaagattatcataatgtagaaaaacaaattcataataatcaagcaataaaacaaaagatgaatcgtttaaaagcgcaacaaaaacaatcggttaattttcaaaattatggaaaacaaaatgcactcgagcaatctgaagctaaaattcagtatctaaaagatgaaattaatgaattacctattgttgaagaatttcgttcagcacaatatgaggcgaatgatttactacaaatgatggtcaaaacaatggaagatagactcaatgaatataataaaaaagaacacaatgaataattattttaaaggagttaagtacaatgaatattagaaagttgaccatcacagcattcttaatagctattaatgtcgtgttaagtagtttaattg

SEQ ID NO: 948 - DNA, 573 bp, Staphylococcus epidermidis
  marker
tggacatgatggatgtgcatctggtggcacatgtaactgttcattgtaattaaaaggcatgatcaaagcattaattaatcagtaataacaaagacttatgtttgtgtaattaatgttatacagaaggtagatttatgtaatcaagaatttgttactttgaaggaagcggtttgtatcatttagaagagaagtgaaatggattaataaactatttcacacctctttttatccattatattttttgaaagggtaagtctactgtatatacattctataaaacaaaatgttagattcgcactctatcaaagtcatttctatctttaacgatgattatttataaaaatatatttataccgtgcaaactatatacaaagttaaataatgatatcgtaaatatcgcattatttagtcaaagataaattaatgttataagactaaaaatgaatgtactttcacttcagaaacgcgcggataatacgttaaatacctaggacaagttggatgtcctaggtatttttagttaaattaatcataagtaatcattacgaaacttatatttcaatttattttaaa

SEQ ID NO: 949 - DNA, 559 bp, Staphylococcus epidermidis
  marker
actcatatgatatataaagtggaatgcttcttcagtagttattttcattctagattgtaaatttatatccgcttcaattctcgcataataagactcagcatcatttaattgtgatttaatcatatcaatatcattatcatgtatttcctcagcacaatagattgcttgattgtttactaaatctatatatttattttctaatgagagcgtgagggtgtcaattaacttctttaattgtaatcttttttctcttaaataattaatataagtatcaatatttttaatttgcttatctaatgacattttatagtcattgatactttttttagtaattcgttttataaattgttgtaaatataaatctaaaatattcaatgatatcacctcgtcactgattaagctttattataaaacaattccgaaacctaatgaaataggcttcggaaccatatatgcttcatactttagtctgacgagatatgaaaaaagtaaatcataatcttaatttctaatttgaattactaatatttaattaatcatcaatcttagttgtaagtaa

SEQ ID NO: 950 - DNA, 558 bp, Staphylococcus epidermidis
  marker
tgtatttgttggaccatggtatggtttagcgcaagcttttatttcttctgtactacgaatttcatttggaactggaagcgcatttgcttttccaggaagtatgataggtgtcttactttccagtctgttttatatgtataggaagcatatttttatggcttcagttggtgaagtattagggactggtgttattggtagtttaatgtgtatacctttagcatggtttttaggacttcaagatttctttattaaaccattaatgcttatgttcatagtatcaagttttattggggctttaattagttatatattgcttattattttgaaaagaagaggtttactagatagatttaacaaaaattaatatttatttgaagtacgcttgatgaataggggattataagtgaaatgttgatatctgttcatatgaaagcgtactttttgtatctattacacaaaagcgtttcaaaaacatatatgttaaaatgaatgagttaaaaaccataaatttatacatataatataaataaagatataagaataagggttgtgaaaata

SEQ ID NO: 951 - DNA, 545 bp, Staphylococcus epidermidis
  marker
agccgttcctgtagcgattgaagtcattgcactgattataaatgcagatactaataaataacttgggtttaaaaatttaagtccatagtaaattaacgctggaactgttccagaatacatccaacttcctacaatgattccaacagctaaaataataaagatagctggcatcgccgtgctcaatcgatgagtaatcccctcttctaaatccttccattttaatcccactctatgtgcaatcaatgctgcataagctgaagaaattaataataatatttgtatcgggacattaaagaaaacaaaaccaattactacaacgacaaccataactaaaatagtagaaatagattctaaaaaagtaggatatctatacttttgagtcatacttttgctcccttcagtatgatttgaaacaaaacctcttttcttaaattttaattgctaaaaattactctaatcctaatttatctaagcctaattcctcgatagtgaggccctcttcaaagaaatcgcgttcaagaatagttgaagctatcataataaca

SEQ ID NO: 952 - DNA, 543 bp, Staphylococcus epidermidis
  marker
attaacttacttaattaatgatacatacttttcaaagttaatgcaacagttaattttacactatgttaaaatttcttttgcaattgcataacattccgttctcgtttttgacgacttttatatgttacttcatttatcaatatatgtcaacactttttatgatgttttgctattttttgtatcaaatagtaaaatcctctcttttcacttgaaatattctagcatatattagttttgattactatacgattattttagcaattttgttatataattctctatttataacttaatacatctttctccttatttctattcttattcgagtttgacacgtattttttcacgggtttaatttcaaacttgaaaataagcgctgcctttaaatattaagaaggcagcgccaaaacataatcaatacaattagatttgtcaacattacgatggtttgtaatttttagcaattatcactaatagaatctatttttgtctcatgtatgggaatagtaatacgtctctaattgacggagaatcagttaatag

SEQ ID NO: 953 - DNA, 536 bp, Staphylococcus epidermidis
  marker
atccatgtattgtttcatcactgagtaaattcctgttagcggccctttattttgatgatgttcgtcatcaataatcacatattcatattcaaactgagaagctaattgggaattagtgctaatgataatgcgattaaacatatttgtagattttaacgtttctataattttttgataaaaatattgattatcaattttagcaaaagctttagctttaccaaatcggctagattctccacctgctaaaataattgctttcatcttgatcaacccccactgaccggtggaatgagcgcaattgtatctcctggttgaactatatcatcctgtctgacgaattcttcattaacagctatttgaaattttttagatttaagttcactatggtgttttaataaatatgactcgaattcttgaacagttaatgtcgtatctaaatgtattgtttcagtagatcgattgagcaactcttttaactctgcaaaatataaaattttcatcttgctttccccttttttgcttcattatatgttccc

SEQ ID NO: 954 - DNA, 534 bp, Staphylococcus epidermidis
  marker
tatttatgaaattacagctaaaaaagaaacaacagaatcataattaaattattataactttaatttcgcatattgagttactacaattataacgttaaatattaaattaagaagagtgagatagaaagcgtaagtaattcgctgtctcacttggtaatgaggactagagttgaaaattgagattagcccaagttcaactcggttgtcaattgccaataaataaaatgcctgggacaatcattgtctcaggcattttctatactaagataatcacttaaatatataataataaacaatgaatgaggtaaatcaatttaaaattttacttatatttttgctgaatcatcattagtataattgccagaatgtttaaacagataagcatatgatgaatgttataggttcattatagaaatattatgaaagggttatagacttataagtgttatcaacatcattatttaattttaatttgtcagattcaacttgtcagtttaaaatagatttgttcatattaaatcggaggtgtctcaa

SEQ ID NO: 955 - DNA, 532 bp, Staphylococcus epidermidis
  marker
tcattattatatcacgctcttatattttcttatcaattaaaatcaatccagtacttccggataatacaccgtcattccagaccattcattttgaactggttttagaaattttactaataatgattgatgatttcgtttttcttctatatgtatattatataaatgggctgcttcataatcagatttctcaaagtactgaggatgattatttacaaaaatagcacaatagccttgttctttagcacgttcttctacagcttttaacagggcttgacctaaaccttggtttcgaatagatttatctactgacagtgcaccaatggctaacgctatcgcttttttgtttttagacgacaacttaacctctgctaacacaacgtgacctataacttcattcaattcattcttagctataacttctaattcataattgtagctttcaagttttcttagatttttaacgcgcgctcgatcttgccaactggattctggatttagattataattattttctatactatttagtgacgtt

SEQ ID NO: 956 - DNA, 532 bp, Staphylococcus epidermidis
  marker
gtaaccgggtacaatattatttaagttaagccattgaatgaaacgcttagaagttaatgaaattcctttatatgcaactggcatttggaatgtgtctgcttgtggtttaaatgtgtgacctaacatgccgttaaatttaataaaaccttcagcaacttcgccttcactagcaccgatagcaatgtcagcttggttatactcagtgaaacgttgaatttgttttttatggaagcttgtaacgagcactcgatgttgcgccccatgtttgatgatattatcgtaaatcacttttggtgcgatacgaccttcatatgtgtctggcgcatcttttaaatccacattgatatacatattagggtacaattcaagcagttcctcgaatgataaaatcttagctttatcgtgcccgcgataaggtgtttgattattgatgtcagtaaaatgatatcccgcatctaatcgttttagttcagctagagtatgttcactcactttacctgaaccattagttgtacggtcgacaagtgcatcg

SEQ ID NO: 957 - DNA, 521 bp, Staphylococcus epidermidis
  marker
ctgatattaactgaagaagcaagggctttaattcagcaaatcaacacggcgagatgcgagttaattgaagcgagatgtcaatgtctatcttcagacgaaattgcaagtttaaatcaattattaaacaaacttaatagtagacacattttcatctgatatatatcggtttttaattatgatgttaagtgtaaaatacattcaattatatataaacatataaagctaagcaactgaattgtaatattaaattacatataagtgtgcttagcttttttatatttgaaaaagtttaatatttagcatatgtcatattcgaagcagtgacaggataaataatcatcaaaaaagtaggcagctctactttcatgaactatgagagctgccttacttcatatttatttgtatattggaatttcgaagtacttaccgacttcaccaattttatcataaaattgttttaatacttgtgcgttgacatttgcccaattaatatcagttgcatattgatgcgtaccagggtt

SEQ ID NO: 958 - DNA, 509 bp, Staphylococcus epidermidis
  marker
ctcaatcatatataggttcttgttaccaaattctctgaaatcagcgaaaagctcatctgttttgtaattgatttgtaaatgtttaacttcacccataacgttatccccctttgtttctttattttattataccctctttaaaatgctttttcatttaataatcatacttagttgatttgtaaaaaatttagataaattaatttataagccgttaaattgtcaatgagaaatataatctttatactatatgaggaatagtgataatgaaggagtaaaaacatgaagtgtaatacgttaaagttaactgaacaggatcagttcattaataaaataaaaaatagtgaatctcaaattacatctttttatgaatatgatgcagcgaaaaaggaaagcttttatagaagattaaaaacacctaataatggaagggaatttcatttatcacgagtgattaaatcttacatgaatgaattaaagttaacacatcagcagctgaataacatagatgc

SEQ ID NO: 959 - DNA, 499 bp, Staphylococcus epidermidis
  marker
ggtgttatcattttgtaatgtttacatagagttatttcgttaaacgaagtctgtaaatagcgtaacgaaagcatgtaactaacaatgtttcatgtaacgttttataattgttatattcttgtaataataaattttgctattattacaactttagctttgatgagtttaatctatcttttaaatatttagccaataaagaatatttacttgatgtaaatttaatcttagatatcgttaagattgttcataaaattgataaaaaaatgaggtgagacagaattcgtatcgaattcgttatcccaccccatcactatggtgaactataataataaataccatatacccatttttgacttaattgtttttgtcatctcattaaatcatgactaaggaaacacattgaatctaactctaatttctagtgatatatagctctcttatttttatttttgaatattatttttcattaacttctttcattttcttaatgatttcatta

SEQ ID NO: 960 - DNA, 499 bp, Staphylococcus epidermidis
  marker
gaatgtttaaattttttatttgtaattaattgtaaaaataatgtattcactaagttgacggtatgcataatgtattatgtttaaagaaaatattgatagatgattaattgtacgagtcaatcatcgcataaatgactgagttgatattaattcttatatctttctcggtcttttttgttgtaagatttaaaagtgaaattgatttgaaagaagcctaaaaacgctcacttctttcaaaaattgttaaagtaaatttaaatcatgggttttaaaggtaaatctatttgtttatatttgtttaatagatacgttgaagtatataatagataagaacgctttttagtagcgatgtgttttattaagtcaacaaagagataaattttaatcatttagtattggaagatctagtatatgaaaaattttaaaaatataatgcgatatattggaaagacttctaaatttatcgattatccattgttaataacttatgttgtcctct

SEQ ID NO: 961 - DNA, 482 bp, Staphylococcus epidermidis
  marker
ctaaatcatgctctgataaagctttttttacaacctcaatactcttttcgagattatcatgctgaactttatacattccaacttgtattccaaattgtttagctaatgctttaatcattggtccgtttgaatttcgtatctttcctggttcaagctcatcttctacttcaagcaattcactacctgtagcaattactgcaacagttggttttcgagccactcgcactttagtataaccgtatgtagctaagactgctatcacacctgagttaatacgcatacctttatgtagtacaatatcaccagcttttatttcttcaccttgtagcgaaatattttctaaatgtttaaaggattttctaattgtaaaagttgtttcagattcaatagtttgttcaaacattactacggcatcagctccagaaggaatttgagcaccagtcattattcgaattgcttggtttttatcaattgttttttct

SEQ ID NO: 962 - DNA, 478 bp, Staphylococcus epidermidis
  marker
tccaacacatatgaaaaaaaatcatgattacatgcgcttagcaattaatgaagcacacaaagccaaagcattaggagaagttccaatcggagcagttattgttaaagagggtcaagtcattgcacgtgcacataatttaagggaaacattgcagcaacctaccgcccatgcagagcacatagcgatagaacgggcttcagaagttgtcggcagttggagattagaagaatgtacgttgtatgttacattagagccctgtgttatgtgtgcgggcactattattatgagccgtattccaaaggttgtgtatggtgctactgatcccaagggaggttgttcgggaagtcttatgaatttattagaacaaccccagtttaatcatagggcaaccgtagaaaaaggaattttagaagaagagtgtgcagaactattgagaagtttttttaaggaaatacgtgaaaagaaaaaagcagaaaaa

SEQ ID NO: 963 - DNA, 477 bp, Staphylococcus epidermidis
  marker
atatgccaaaatagctttaggcatcggataatataaaggatagctactcattgtttggaataatgatgtagctatcctttttaattattaaagaaaattcaataagaattatcgtatgttcatttaatatttttataaattaggcctataataaaattgaattaatattacaaatgtattacaatacttaagacttataaccttttaatgaggtatatcttacgaagtatgataattaactcaatggaaacgtgcgctatatgatagggatagctataacataagagaatgaccttgttaatttgaatgagataaaatttgtttgaataagttgattagaagcaatagcgttcgtcttatgaaattgattagtaaaaaagttacttgtctaacgaaatttattattaatagggaagaatgtaacaatgagaaaaaaattaaataatgaatatcgctctgctaaaaaaatacgatata

SEQ ID NO: 964 - DNA, 476 bp, Staphylococcus epidermidis
  marker
tatccctattaaccgttctattctacggtttagctcaaatactacctgggttggttttaggtagccatttacttggagatatgtctaaaatgcaaactgcccaaacaatgagtatcatgcaagtatctatctttatcatcgctgcattgttaatcattttcatgcaagcaaccattaaaaatcctactcaattagaacaaggacataaggaacctaaaagatatattttcgcctgggttctattaggattttgtattgtgatgatttaccaaatcatcatcagtataattttatttgccatcaatggcagtccgcaaagaagtccaaacactgaaaggttaatggctattgctaagcaaatgccgatatttatcgttttaatatccatagtaggtcccattttagaggaatacgtttttcgtaaagttatcttcggagaattgtataactttataaagggatcacgtgtggtaagc

SEQ ID NO: 965 - DNA, 460 bp, Staphylococcus epidermidis
  marker
tacaaattttgtagcgaatcgatatttatatttaaaaatccatgttttagataactttgaccctatttaccattttaaacttaagacaacaatttgtttccaaacttctataagtattttcatgatatactaattctcttttaaaagtttaaaatgatgtcactataacaaattcgttaactcagtatagtaaactttgacttttatcattcgaaaacataaattttataacactcgtgataaaaaattttcagttcgactgtgctgaggattttcaaatatgttttgtggtgtaccagattcaaccacaacaccatcggccataaatactactttatcacttatttctttagcaaagttcatctcatgcgtgacaatcaccattgtcataccttcattcgctaattgtctcattacttttaaaacatcccctactacttcaggatcaagtgcagatgtt

SEQ ID NO: 966 - DNA, 454 bp, Staphylococcus epidermidis
  marker
tcccgttattacataatagtcaataaagagttacttgctaataagtgttcagaaagttcaaactctattaactattattttaaacgatttacaaatcgtaataattactatttacaaataacttaatttctttcataatagtgttatacaaggaggaagataaaatgaaacagaatttacaaacagcaagacgcaacctcaatagtcctaatatcaaaacacgaaaacgtgctttaaaaataataaaacagcatcaacgttcgaaataaatgtaacattcgtcaattattttaatttaattcgctcaataacctaggtttcataaatttatctataatttaattgttttaaatatcacttcacacaaaaaacaagccattcaatgaaatcaatactgaccattgaatggtttatttattatgatatgaaaatattttaaactatatacatcttg

SEQ ID NO: 967 - DNA, 449 bp, Staphylococcus epidermidis
  marker
tgcaaaaaaagatactatgattggcaagggtaagttaaataatcaaattacttctattatatttgattatttaactcataatcatattgacaatcactttattaaacaactttcacaaacagaacaactcgtccaacaagttgatattatacctttagaagttgttgttagaaacattgccactggttcgatcacaaaacgtcttggttttaaaaaggggcatacatttgaagaacctctagtagaattcttctacaaaaaagatgaacttaatgatccgcttattactgatgaccatgtaaaattactcggcatagcgaacgatgaagaaataaaacaacttaaacaaatggcaaaagatattaatcaagtactgattcaattgatgaatgaaatgagtttgagacttgtagattttaaggttgaatttggtaaaaccaatggtggaa

SEQ ID NO: 968 - DNA, 448 bp, Staphylococcus epidermidis
  marker
gcgtgtgccagttattgccatcactggggcacctactcgagctgtagaacaagaaggcaaatacgttcaccattcccttggcgaaggaacttttgatgattatagaaaaatgtttgagcctattacaacagcgcaagcttatattacacctgataatgctaccacagaaattccaagagtaatcaatacggcgcttcaacaacgtcgtccagttcacattcatttacctattgatgtcgcactaacagagattgaaatttcaaacccattcaaaccagaagtcgaaccacaaaaaaacgttcaaagttatatcaatatggttcaagacaaacttgaatcggcatcacaacctgtcattattacaggacatgaaataaatagtttccatctgcataaagaactcgaacaattcgttaatcaaactcaaattccagttgttcagttatct

SEQ ID NO: 969 - DNA, 420 bp, Staphylococcus epidermidis
  marker
acttattacagcaaaacagataaaacaagatgataaacgactgaaacaacgtaaggtagatattaaacgtcgatataattaattaaatagtatataaaattttaatattaagtttagactatagcccaagatgaatgtaaattattcctcttgggcttttcatatcataatgtttggtatagttagtcactactcattatcataatttaagattctgtaaatatgcatactttaactagcgtcattcgtatatagatgataatattaaattattaacatttataagttttcttgtaattgactgacaacttaacttacacatagtgtagtcagtttgaactaatttatttaattaaatgttacaaattgataaatgatatgattctttcatgaattactatagaattattcaaacatttg

SEQ ID NO: 970 - DNA, 397 bp, Staphylococcus epidermidis
  marker
tgaaaagaagatgcctgcggtgaggcataatataaaattaatattaggaccaattttgtttgttgtaacttgtttgatacttgttctttttcaaaaagatgttggtcaaacaatgctgattgtgatcatattcttctcaattattttttactcaggtatcggtgtgcagaatatgttaaaatggggcgctttggtagctattggttttatcatcgtagctacatttatgttcatgttagatatggttccaagttatttgcaagcacgttttagtacgttaaccaatccatttagtcaagaatcaggcacaggatatcatatttctaattctcttttggcaattggcaatggtgggttgttcggacgtggtctaggaaatagtattatgaagcttggt

SEQ ID NO: 971 - DNA, 396 bp, Staphylococcus epidermidis
  marker
aatagtccttctaatttagccctcatgtactctatggtatatgagggcttgtttgtatatatatcaaaatgatgcttcattttttgctgtaattttaccaagaacataacttactaagaagccagtgatcaataggaaaaatgatatgatccattggattaagtctttcgggaatccagggaaaactgcatacaacgatccgattacaaagcctattatcaaagcaaatgtcattgtagggtgttgatgtagacaatattgaattaatcgacttgaaatcataaaaccagttacaataccgaaacctactattaatatgataggtaatgcatttaaattaaaatgaagtagttcagaaatagcatacattagcgtcccatatactccgaagacaag

SEQ ID NO: 972 - DNA, 385 bp, Staphylococcus epidermidis
  marker
aactacaaataactatttaaaatctaaagggaaaacaccagttcagtggtgtgaaagttaggtgagaataatgaacaaagaacagattctacaattgattgagcaagaattgatacaagcagatgaagctcagacagatacggaatttgaaaagcatatgtatgctatacacatgctcacatctcttgttagttctcatcaaagtcgttctacaatagagaaattaaatcattctaaaccaatgaatagtaatatcaaagatgattatgagatgaaacaacagtcttcacaaaaacatcatgtaactgcagctgaaatagaagcaatgggtggtaaagtaccacaatcaatgaaaaagcatcatacttctaataatatgatgatt

SEQ ID NO: 973 - DNA, 376 bp, Staphylococcus epidermidis
  marker
ctcaatcaacgtcttagcattatctgaaatatgagactggtgtagcattgtatgattaaatccatcaaaagaagctttaaaaccatctttcatattaaattgatgatcgaatgttccaataactaaagcactgatactagagataagcattgacggtactgtagagattctaaatattaaacataaaactatgataataagtgggatccatacccaaaaattcaagttataaattgttgttaattcttttaatagattttgaatttgttgtgtatttgcgtctcccttatattgtaatccaacaataaaccatatagccaatcctattatagaagcagggattgttgtccacatcatcgatttaatgtgagcaaaa

SEQ ID NO: 974 - DNA, 372 bp, Staphylococcus epidermidis
  marker
atttgtagaaaagtaaagtaaataaaggatgattctgtgattactgaagaaacattagacattttagatgatattgaggatatatcggatatgattgtacaatctgatatttatgactcataccgacgagctaaaatgcaattagatgcagatgatgaggcaagtctactttatcaagcttttctaaaagtgaaagataagtatgatgaagtgatgagatttggaaaatatcatcccgattacaaagatattatgttagaaactcgacaacgaaaacgtgcttatgaaatgcttccagtagtaatggagtataaagcaaaggaagtggcattacaaaatttaattgacgaagtgatgtccaaaatcgcattt

SEQ ID NO: 975 - DNA, 361 bp, Staphylococcus epidermidis
  marker
gaagccaagtgaggcgcctatgaatcgtcagaatcagatggaaaaacgaatgcgcaaaactgaaagcttggttatcaataatcctgtgttactcaatgaacatgaagacgaagcagatatactgtatataggatttatatctactaaaggtgctattggagaaggtgcagaaagactagaacgacatggtgtaaaagtgaatacgatgcatattcgacaattacatcctttccctaaagatattgttcaacaagctattaataaagcttcgaaagtaatagttgcagaacataattatcaaggacaattatcaagtattttaaaaatgaacacacaagttaatgataaattagttaatcaa

SEQ ID NO: 976 - DNA, 355 bp, Staphylococcus epidermidis
  marker
agataataattgatcgcgataaaacatgtcaccttcatatttaatcagttgtaacatagcttctagtaaagaggttttaccagcaccatttttaccagtgattgttaaccattcacctgaatacagtttaagctccttggatgaaaaaagtgtctttttacctctaataatttgcccgtcgtcaaaatgaaataagaggttctttgtttgattaggtaatgggatggggcgtggtgcactgtgccatgctctagggtgccaaactccatattcagttaataacgcttcataatgatctaagatttgttctggggtgtcgtcagcaacaatttcaccatcataatttaataacaac

SEQ ID NO: 977 - DNA, 338 bp, Staphylococcus epidermidis
  marker
cgtacctgaaggaatagaaattgagacgcttacaggaaaatacgactaagtttaaattagaataatatttcttatcttatttatttaagagcctaacatgccatagtgtttaaggctcttaaaattttgtatgaaaatattggtatgctatagacgccatacattatcacactgaaaatatgatataaaagacttttatcaactgatttattataaataaatggtgtctaaataaacatttagatatgatttacattaattacagtaataaaaggctaataagttaattatcaaagatagatgtaacatcatatacatgtctttttgcactttgacta

SEQ ID NO: 978 - DNA, 331 bp, Staphylococcus epidermidis
  marker
tgtaaaacatatccaaacagggcaattatctggtatcaatgtaacggcactgtatacagataatgaaggggtaccctgtattgatagagctaaaaatttaaatattccaattcatattaacaagccaaaagacttttcatccaaatctttatatgaacagcatctacttaaattattatccagtgaggaagttcagtggattgtattagctggttatatgagactagttggccaagacttattacaagcttatgaaggaaggatattaaatatacatccctcattattgcctaaattcaaaggtttagatgccataggacaagcgttagaa

SEQ ID NO: 979 - DNA, 324 bp, Staphylococcus epidermidis
  marker
gctttgggtgtaaaggataatgaaatattagcaggatttttgtatcttactgatttagaagaagtaccaacgaaggctaaacgtaaaaataaaaatcttattaccgaatttgaataaatcatccgtgatattgagcgtgtattaaaatttaaaattaggtgagatggaatttgtgtttatcgtttcaccgatacagtgagtaacagagttgaaaacataagtatttactttagttactgacgaataatacaagaaaaacctgagacgtttgatgatgtctcaggttttttagttaaatattattgatctaaatgttcagtcaag

SEQ ID NO: 980 - DNA, 323 bp, Staphylococcus epidermidis
  marker
ctttggtattgtctttttcagtggttccttgtatttcttagccttaacacaagttcgtattttaggtgcaattacgccaataggtggtgttctatttataattggttggcttgttcttgtgattgctacacttaaattcgctgggtaatcacttcatataatcatgttacaatatgacaatctttacaatttaatggtaaaagttcatgagttaattcactcaccttttagggtatactatactctcgaggtgagttttatttatggaaaataaaaataacaatgtagatagaggtaaccttaagcagaatctttccgagaaa

SEQ ID NO: 981 - DNA, 322 bp, Staphylococcus epidermidis
  marker
cttcttctaagacctttatgttacaaaatctttgttaatcttctttcaaatgttcaattgttttgaatccttcacgataattagctagttcttccatcatcgcgtaccaatcatggcctactttttgtagtgtctgttgaattaattcatcttgtgcttggtttaacttacctattaaatcatcacccgcttcagtggtaaaaagtttttttactcgtctatcctgcttagatgtttgttcgacgattaaaccttcttcttttaatttacgtaacgttgcatgcgatccttgtttagatatttcaagcgtaatcaaaagttc

SEQ ID NO: 982 - DNA, 321 bp, Staphylococcus epidermidis
  marker
atagcattgaatagaacggtagatgttaaattagctgaagcattacattctatctttttagaagtagttatcgcacctcaatttactgaggaagctttaaaaatattgacacaaaagaaaaatattcgtttattacaaatagatatgacaattgataacgctgaacaagaatttgtttccgtttcaggtggttacttagtacaggataaagataataaagatgtgactcgaaacgacatgactgttgctaccgacactcaacctacagaagcacagtgggaagctatgcttctaggttggaaagttgtaagtgccgttaag

SEQ ID NO: 983 - DNA, 320 bp, Staphylococcus epidermidis
  marker
aattgcggattctaaagcaaaaccccaaaagccagagaactgtgtggctcaattaattgagttaccattcactagcacggcaaaggaacttggaacagcattaatgaagaatatggtggcaattggtgcgacatctgcactgatggatttaaatacatcaacttttgaaactttaatcgataacatgttttcaaaaaaaggtaataaagtcgttgatatgaatatacaagcccttaatatgggttatgatttaatgaagcaacaagttaccaacgttaatggagactttacattagagaatggtagcggtcatcctcatt

SEQ ID NO: 984 - DNA, 316 bp, Staphylococcus epidermidis
  marker
ttgtaaagtgcttcaaactcctgtagtttcaggaaatgtttcattatataacgagacacgtggaacctctatcttccctacacctgtcgtaggtatggttggtcttattgaagacgtgagctatctaaaagagtttaaacctaaagcaggagataagatttatttagttggtgaaacgcgtgatgactttggtggtagtcaattggaaaaattgttgtatggatcagttaatcatgagtttgaatctattgatttaagtgatgaagtttcaaaaggaaaattaatcaaacaggctattcgtaatggcattgcatct

SEQ ID NO: 985 - DNA, 312 bp, Staphylococcus epidermidis
  marker
tgaaaagaaaggggtaatctattgaaagttttaatagttggagctggtggacgtgaacatgcattagcttctaaaatcaatcaatctccaattgtagataaggtttacgcgattccaggaaatgatgcaatggtcaatattgctgaagtgcacagtgaaattgctgaatcagatcatcaagctattttacattttgctcagcataacgcaattgattgggtaatcattgggcctgaacaacctttaatagatgggttagctgatttattaagaaatgcaaatattaaagtgtttggtccaggacaagatgcc

SEQ ID NO: 986 - DNA, 302 bp, Staphylococcus epidermidis
  marker
gtacttttgtcaatgacaattagtgtttttccaacgattttttgtagtgtatttttatatctttcccatattcttgtatcaattcttctgggcttaaataaatcttttctaaatataatccgtcaggtggagctgtgagaggcacattatttctatttttgtcctctaagagcttagggacgtcattaggttcacgctttccttttcctacttcaattaagaaagctaccaatacacggaccatattataaaggaatccagaacctgttacgacataatcaaacccttctttagtagcaaca

SEQ ID NO: 987 - DNA, 297 bp, Staphylococcus epidermidis
  marker
gctctacaagtttataaagattgcgtcgtaagagaggctctcctcctgtaattcttatctttttaactcctaattgagcataaatctttgaaattcgtgttaattcttcaaaagtaagcaattcattcttaggtaagaaagtgtaatcatctccaaagatttcctttggcatacaataatcacatctgaaattacatcgatcagtgaccgatattcttaaatcccgtattggacggcctaatttatcttgtattacctctttcattgttggacctccttattcatttatctgcattt

SEQ ID NO: 988 - DNA, 294 bp, Staphylococcus epidermidis
  marker
cactgggaaagagattaaagcagttgctaacccagcaagcattgctacagcagcagaacgtgatttgtatttaaaaatagcaaatataatttcacaagccaatccctgtaatatcgcatatatgatagtaggtatatcaaattttcccataacaatcgtttcaccagctccagctgcgatttctgctaataatgctatacctggcttaggaatgattaagtaacaaacgactgctgccataaaccatacaccatatgtaagttgttctaagtgaatacccgcaacttgtacaat

SEQ ID NO: 989 - DNA, 293 bp, Staphylococcus epidermidis
  marker
atttgcgctccttttaagtatatttactaccataagtttatatagcttttattggtgcgtaaggataattgtcattatttatcataccattttcaccattggtttgattgttgtcttgttgatttgggtacctggttcgtttccgtttaagctattttggtctgtttgttcgttagtttgatcttcttcatcattattttgtggatgaagaatcagacttctttctgactatcagtcgattccttttggttcttacgcaataagtcttcatctaattctgttaagggtacgag

SEQ ID NO: 990 - DNA, 292 bp, Staphylococcus epidermidis
  marker
cactaaaatttctaactttttatgagtttagtaaaaatgcttcaaaaacttcgttacctataacttttccgcgttcggttaaagatataaattctccttcttcttttatgagtcccctacacctcaaatctttaatagtttcaacaaacacctcatcgattaatttattaaactttttcttaaaacggcttttactcacaccttgattcattcttaaaccaagaaacatttcttcttccattctttcgttataagtaggagacgtttcagatagtattggttttttcccttc

SEQ ID NO: 991 - DNA, 274 bp, Staphylococcus epidermidis
  marker
ttccgattttgaccttataacaatgattaaagataaaacgagtattcgtaatacagttaaagatatgtattcacgatatatggatttagggaaaaaagagaaagatgtattaactgtattagaaataatgaatgaaatggcgcatcgaggttttcgattgcaaccgattagtttagaaaaaagccaagcttttgacttcatcattgaaggggatacattgattcctccattcatttcagtgccaggacttggagaaaacgttgcacaaagaatt

SEQ ID NO: 992 - DNA, 274 bp, Staphylococcus epidermidis
  marker
cacctctgtttttgagcttttttcaccaaatgttttacttatatctttaacaactagacccattattggccacctccaatagcttcaataggatcaattttaattaacttaataaatgataatgatgtaccgattaatccaactatcataaatacgacaagtacaatgattatattatgcatatctatatggaatggcattgaaactggtaaaatttgactgatgagaaaaatgactacttctgctatagctacacctataaatgtaatcattg

SEQ ID NO: 993 - DNA, 268 bp, Staphylococcus epidermidis
  marker
tgtaaatacaactggtaagtgtaagatattagtaaagaattctcctacaggacttcttgttgaaaatataattaatagtataaaaccaaggacagtaggtggtaacacaattggtaaaatgataaaactttctaatagatttacccaatatctttttttattgtatagccatttagaaatcaaaatgccaaaaatagtaactatcattgtactgattaaagcaacacgaaaagaaatccaaaaggacgttaaatcaggcatagctctg

SEQ ID NO: 994 - DNA, 267 bp, Staphylococcus epidermidis
  marker
tgttatcggatttttatatttagaccatcaatcagaacgattagaaaacttattagaaacaattgttaggatagtggatgaaaggtagtgtgaatgtggaagatatagtgatagtaggtagacacgcagttaaagaagcaattatatcaggtcacgccataaataagattttgattcaagacggtataaaaaagcaacaaattaacgacattttaaaaaatgcaaaatcacaaaaattaattgtacaaacggtaccaaaatctaaat

SEQ ID NO: 995 - DNA, 266 bp, Staphylococcus epidermidis
  marker
attgtcatttgcaagcttttctaattctttaattttagtatcttgagactctgactcttcatccttgatactttcttctgaattattttctgaatcgctagcattagcttcactattatctgtgttagatactgagttttcaatatttgtatcattctgattgtcttcagtttctacattgaaatcttcctcagtattattcactgactgatctttttctgacatagtctgacctccaatacaattccaattactaccatatacgg

SEQ ID NO: 996 - DNA, 264 bp, Staphylococcus epidermidis
  marker
tgtcactgtggcagaactcaagtaaccttaagatatgagtaatgtgactatatctgaataattaaatggacaattttatagaactcagtattaaaaatatttaataaaaagtgcttaatatcaagtataaagtttaaagagaggacaagggcgcacattagcctaataactagtgtgttaagacgctctaaactcgctaagtgtgttaagagcatctataatgcaaaggtgattaatctctgttataatttgttcatcattgaa

SEQ ID NO: 997 - DNA, 258 bp, Staphylococcus epidermidis
  marker
gattgcaaactcctcgattagatttaatcaaggagtttttttataaggaacaactttaatctggaacgtaagccaaagcccatacataagtgacacaagcaattaaaaattgcagtgaaaaagaggaacgcttgagcaaagctcaagcataagtgacactagcaattaaaaattgcagtgtcactaaatgtttaggttttggggattttgtgaatgatgatagtgatagttactttgacgcttagaaggtggattgac

SEQ ID NO: 998 - DNA, 257 bp, Staphylococcus epidermidis
  marker
tgaagattctttagagtatttggagccattagatcatgatgcatatatcgtgaggttaaactttactggtgaaaatacaactgagcctatcatatcttatatgacgaagacgcataacatagatgtgaatattcttgaagcagatattaagaatactaaaaacggttcgcttggatttttagttattcacataccacatataagtgaagaacatttcaagcaatttaaacataatcttcacgaacaacacgttaatg

SEQ ID NO: 999 - DNA, 257 bp, Staphylococcus epidermidis
  marker
tctataaatatgggtataaatcactgttgaagttttatttgaaaggatgtcattatatgggaattagaagtaaactaactaataatattacaaataaagtagggaactcattattgaacatagaggaaattaaagagaaaggtgatttgccaactacacaggaagaacttagacaacgcagagaaagagctgaaactctagttaaaaagaaatcgctactttcctccggtgctagtattgtccctattccaggactt

SEQ ID NO: 1000 - DNA, 253 bp, Staphylococcus epidermidis
  marker
aataaataatatagtagcgataggtattaaaagtaagactgttaatgtgtctttatattgccaatgtaataacctatagcttgttcgtttgatgttaatatcataacctctgacttccattgctatagctagttcttctgctctttgaaaggctgaaataaataatggaatcatgatgggtataaaagctctaattcgtgttattaaacttcctgaacttatttctgatcctctagatttttgagcaagtata

SEQ ID NO: 1001 - DNA, 251 bp, Staphylococcus epidermidis
  marker
tactttgctagcaacttgttttggtgtaccccaaggaactgtgtaaagtgttgaccctgctttaacattatatgtttgattcacttttactggtgccttagcagtgttataaacaacatcaccttgtttaacccaaccgtattttttaccgctattgtagtcttcaactaaatagaatttgttatttcctaatgttgcagttttagtaacggatagagttttttgtacttgatcagtcttatgacctttac

SEQ ID NO: 1002 - DNA, 249 bp, Staphylococcus epidermidis
  marker
gttaaacttactgttaaaggtatagatagtacgcatgaaaaatgggtatgttcagtatgtgcccaaggagaaaacccctggttacattctaacgatgataatacgtatcatacacaccaagacgatatagaagaagcatttgtagtgaaacagatacttcaacaccttgctgcaaaacatggtattaattttcatgagatggcatttaaagaagaaaaaaaatgcccaacgtgtcagatgacacttaag

SEQ ID NO: 1003 - DNA, 249 bp, Staphylococcus epidermidis
  marker
cttataagaaaccccttttttatttaatgtctcaataaattgaaggttatcatgatataaaaagtcttctttaccacacatgataaacaattcaggaatatctacattagcatcgatggcttgatcaagtaagtagtacgtatcgagttctgtacctttaatttgagtattgttgcctgtgatagattgaggggaaaaatcagtccaatccaagtcaatgaaacgttgtgcttcgaaaactgctgaaag

SEQ ID NO: 1004 - DNA, 245 bp, Staphylococcus epidermidis
  marker
cgctttacaatctggacaccagtcggcttcaaacttgataattactggatcagtactaccaatagtagaattaaattcttcggtttgatgaatatttttcatcactatctactccttttgtaatttggtaaacttattataacgaatgactgcacattaacaaaaatattagcttgaaaattaaagcgttcaattaaatatcatgatatatttaagttaatagagagaaggaggtaaaaggtaat

SEQ ID NO: 1005 - DNA, 241 bp, Staphylococcus epidermidis
  marker
aagaccatatgatgcttctctgactgaactaggaactgctctgatagcttcctgactagcaacgataataacaggcaagattagtagtgacattgtaagcgcagcggctagcacgctattacctaaacctgccgcgcctacaaataatgtataacctagtaaaccgaaaacaattgaaggaacaccagctaaattagatatactcacctttacgatttgtgtaaaaatattgtctcttgcg

SEQ ID NO: 1006 - DNA, 241 bp, Staphylococcus epidermidis
  marker
tttagacatttaacactatcctttttttattcaatatcgttattataataaacttttgactgatagtcatatatttcagaaactgttcaaacttttaataggtcaacttagttgactttatttcaaattgacgttaatatgatacttgtaagataaaagaaatcaaaggtggaattatatatgaaacaacgcgtaggacaatatttaatggacgcggtttattcagcaggtgctgacaaag

SEQ ID NO: 1007 - DNA, 241 bp, Staphylococcus epidermidis
  marker
attctctctttgatttaactctttttgaataatgtggtaaatcgtttgtgcgacaatttctgttgagggacttttatccttaaaagcaggtaagtcattaagcaaataatggtcaaattgttcatgaactagcttttttaaatctctaaaattaactaaaaatccacatttatctagtgtattaccagcgattgttaagttgacgtaatacgtatgaccgtgtgtacgaatacattttccc

SEQ ID NO: 1008 - DNA, 238 bp, Staphylococcus epidermidis
  marker
tacacgatccactaattgctcatacctttcaagtaatttatctgtatgttggtcaacgttatcatcaagataaggattacctacttgtagatagaatgggatgttagggtagcgatgatgaattaattttgcaaaatcatagtctgcatcgtcaaaaatcaccactttcaaattaagtgaatgaaatgtacattgatttataacagaatctaatatttctagattagttttcattccc

SEQ ID NO: 1009 - DNA, 234 bp, Staphylococcus epidermidis
  marker
ccaatttgtaaatttatcatctcaactacttcatttgcaagtaatagctcttctttttgactaaagtaagactcaatgttttgagttagtactttacgattaaaactgaaatgttcggtcaaaaagtttgctattttatttaaattaatattatttagttgagcatgtgatacaaaatgtatattttcaacatgtccagaggaaaataccattactaaaataatcaaatggttg

SEQ ID NO: 1010 - DNA, 234 bp, Staphylococcus epidermidis
  marker
attaacataaataaagactggggcattacattgagtaattgctccagctttattttgttttcattaatcaatttgataatggaaaggaggagccctttggaggaatatcaaaagaaaattaaagaaaaattaaacgtagtccctttagagccgggttgttacttaatgaaagatagaaatgatcaggttatatatgtggggaaggcaaagcgtttaagaaatcgtctacgttct

SEQ ID NO: 1011 - DNA, 230 bp, Staphylococcus epidermidis
  marker
tcgcagctgcttctgtaatgattacactgtcagcgcttgttagatcaagtacatttaatccttgagcagttgtaacttgaacaccaggaatgttacgtgctgataattcaacatttacatcttcgttttctgttacaactaatactttcttaggttgttcaagagtagttaatacatttttgaattcttttgtttttggtgcttcaaaaccaaaagtatctacaattgta

SEQ ID NO: 1012 - DNA, 229 bp, Staphylococcus epidermidis
  marker
atttaacttataggtaagtcaatcactaaattaaaattgcgcttaaatcggtctttttgtactctattccaacatcctaaattcgattgattcataagattatttttcagacattacaagtttagggtttgttgtaaagaaacaacgtatttaacatgaattctgatacactcactatttcatatcactcaaatataaatgttgttaatttaaaaattgtgttaagaat

SEQ ID NO: 1013 - DNA, 229 bp, Staphylococcus epidermidis
  marker
ttataattttattcatagctgtctctcctttatatatgtatgatattaaaacacgtatgcctttttaatcatcacttggattgtttattcaacttaataataacgtattttcaaattaaaaaagtcatttaaataacgacctattccgtcttcattattactatacgtagtctcatttgctatttcctttaaatctttcaagccattggccattgcaatgccatgggtc

SEQ ID NO: 1014 - DNA, 227 bp, Staphylococcus epidermidis
  marker
ctaaacatatgaacgtaaaacttcttaatcctttaacattggcatatatgggtgatgcagtacttgatcaacatgtgcgtgaatatatcgtgctaaaattacaaagtaaacctcatcgtttgcaccaagtatcgaaaagttacgtttcagcgaaaagtcaagctaagactttagagtatttgttagatattgactggtttacagaggaagagctaagtgttttaaaa

SEQ ID NO: 1015 - DNA, 226 bp, Staphylococcus epidermidis
  marker
ataaggcgagtcaatttcagtaacatctaaccaatctgtcgataattgtttaaagacatgcttcagacttaaatgatttgaatttaaagctttttcaataaaaggaaacgtcgaaagtgtataaaaaccaatcgtcggtatacatatttctccttctttaaatgcgacaatatctaaacgtgattcaattaagtttgataccatgaaatgatataacccattcact

SEQ ID NO: 1016 - DNA, 224 bp, Staphylococcus epidermidis
  marker
ttaaataaaaaagccggcttatctcaaaaggttattgactatttagatgaattaggctcattgccagatttacctgacaaggcacaattgtcgatatttgatatgtaagcatttctaattactaaattgatatcatatatgttcaatcatctttattagtaaccctatatcagtttgtttacttattagacttgtgatatactaaatatgcgtaaaaaatgatt

SEQ ID NO: 1017 - DNA, 223 bp, Staphylococcus epidermidis
  marker
aacaatcttcttttcactgtctggaattgtatttttcttattgttttcagtagttactattgtggcaactgagtcttgattatttgtttgtgcgtctaatttctctttttctgctacttgtgaattagccataattaaaaactcctttatatattgagacctagatgtgatgttataggtcaataacgtttatttataaaaatgcatttcccttataattttg

SEQ ID NO: 1018 - DNA, 221 bp, Staphylococcus epidermidis
  marker
catttttttcataaataaaaactctccttcatacgtttttgttatcgcagttagatagtcatagttgagtattattcaagaatataaaaacgttcatccacaaagggacgaacgttatcgcggtaccaccctagttataagaattgtgacctatttacatacttgaattttgtttgtctactatttcttatcactttgtatactttatttaactaatatag

SEQ ID NO: 1019 - DNA, 220 bp, Staphylococcus epidermidis
  marker
tatagtaccaacttgtccgtcttgaacattttcaccatcaatttttgtaattggcataacttctgcagaagtactagaaatgataacttcatcagcacttttaagaaattctactgtaaatttttcttctttgaatggtatttgttcatcctctgctatccattttatgacacggcgagtaattccgttcaatataaaattattaactggatgcgtgtat

SEQ ID NO: 1020 - DNA, 213 bp, Staphylococcus epidermidis
  marker
tgttaataaaaataaataattgagatgagaatagtaataaatcaaatatgagtattgctattaaatgaagagtggaaccgtgcgagagcgcctctagcaacaaatgttagaggtgctcttttcatatttttaaacttatgataccgatgatattccgcatagtgatttaaacgtgttgaaattaatttgattagactgagggggagacgttcg

SEQ ID NO: 1021 - DNA, 213 bp, Staphylococcus epidermidis
  marker
ccagataaaagtgatgaacgccatacctctgtgcgaaaattgtacccaatcatgcgcattatgaggaacgatatcatcaaatggaataggccaagcaccataagcaagacttgatttagtatgtctaactaaagcacctgtataaatagttaagtatacgatgatagccattaaccaagttaagatacgtaaaggtttgtgaataaataaaat

SEQ ID NO: 1022 - DNA, 211 bp, Staphylococcus epidermidis
  marker
taatttttcgattaaagaatggtctttgacatgattagcacttagatgaactaaaattgaagcgatgatatgtggaacatgactcactataccggttacgaaatcatgttcatttgcatgagtaacgataaattttgctaacgtaggtttaagtaatttctttaaatatgtcgcggcttcattattttcgatttcattaaatacaagaatg

SEQ ID NO: 1023 - DNA, 206 bp, Staphylococcus epidermidis
  marker
taaaagcatacgataatcaattaagtcattatccaactgtacaaggtgacaatgttcagtatggacagtatattagtgctaaaacaaatgaattattagacaaagccgagaaatatatgaagtcctatgaagatgagtttatttctatggagcatatattacgtgcagccatagatactgatgaaactactcaaaaatgggtcggc

SEQ ID NO: 1024 - DNA, 201 bp, Staphylococcus epidermidis
  marker
cgttgaatcgtacgtgttggtttcttaggttgttgactaactttattagttttgatcccttgttcttttaaggttttaagctcattttcaagttgttctaaacgttgtaataacatctcattatctggttcattagctaccgatgctgttgctacattttgtacagtttgaggctgtgtcttaatcatttctgcaagttta

SEQ ID NO: 1025 - DNA, 199 bp, Staphylococcus epidermidis
  marker
gaacttatcaggtaaaggtcgtaatgatttggatagtaaagtaaatgacttagctttgacagaaatctcgcccgtattagttttaaacatgacaccttcaacacctatgatgtcacctaagtcagccattttccaaatgttaaattgatcatctccaacttgatcttttcttacataaatttgaatctgacctttcaag

SEQ ID NO: 1026 - DNA, 199 bp, Staphylococcus epidermidis
  marker
taatgtcttcagttgtaatggcataaactccttgttctaattcttcataaggtctatcataactttttgtaaacgccataataacaggttttacaggtggtgtaggaaatgaatgatttcgaggagcagcaccacgagtagcttgtatataaataccgccattcactacattattttcttttaataatcggcgtactaa

SEQ ID NO: 1027 - DNA, 199 bp, Staphylococcus epidermidis
  marker
ggaacaacttaacataaattgaacaagtgagctatgaatatattatattctgctaataaaggtggtaccgcgcgtcagcgtccttataacgaaggaggctgatttttttcggaaaaggaggaaatcaatggatattgtatacaaaaaggtgaatgctcaaattacgccagaagctttagcaaaattaaaaacaaaaaaa

SEQ ID NO: 1028 - DNA, 199 bp, Staphylococcus epidermidis
  marker
tgtgttgataacacttttacttattatttcaatttcactagtcattgcatcaacatattctattattaaaccagtgaccgcattaaaaaatgcaacaactcgaattatgaaaggtgatttcagtacgcctatcaaacaaacacgtcacgatgaaatcggaacactgcaatcacgtttcaatacaatgcgtcaaaattta

SEQ ID NO: 1029 - DNA, 198 bp, Staphylococcus epidermidis
  marker
tgtgacatacttaaattgatgagagtatccttcttcaggaatatatatgaaactatcaacagcattatcactatataaacgtttgccattactagaaaattgaaagaacaaataaggtaataagtccatgggtacattgatggaataatctttattagaaagttttattgtgctagcattttccataggttcggcgtt

SEQ ID NO: 1030 - DNA, 192 bp, Staphylococcus epidermidis
  marker
ttcgggagttagatgtcccgcccctttaacgaaagtttgaattaatagtgctactaaaacaatgagcccaattaatgtacataataaaaataaccatttgtttaccgagtttttcctatcacgagaagaaatatttttttctacggcatctttatcaatcaatgttttgttagcagtatttgaatgtgtaga

SEQ ID NO: 1031 - DNA, 191 bp, Staphylococcus epidermidis
  marker
ttattaaacaaatcaatgttgctaatggagatgccattgccacaggagatttattagtggaaattgaaaagcaatcataattaaaatgaccatctagattaatatgatatttagatggtctatttatacttaaatatattgaaacacgccacttatcttaccgttatggtattttgagtggcgtgtttctt

SEQ ID NO: 1032 - DNA, 187 bp, Staphylococcus epidermidis
  marker
tgagcgtaatgaaatcattgatagtgaagaaagttctcaagtcgttaacgcgatgttacgttctacattgcaacgtgcgattaatcattttattaatgaagaagacgataatcctgactacacgccatttatcaattacgttaatgatgtgttcttgcaagaaggagatcttcaagatacagaaatt

SEQ ID NO: 1033 - DNA, 183 bp, Staphylococcus epidermidis
  marker
aaatgcccactccctaaatttttatctttcattattttaacatagaatcgctttcacttaatttaaattcgcttgctttttaacattcagtaggataaacttctattgtgaagatattaattgaaacgatagggggaatatgtcatgtctaaccaatcgaagttaaatagtgcggcatatgac

SEQ ID NO: 1034 - DNA, 181 bp, Staphylococcus epidermidis
  marker
tacttgatttgtaagtgattttggtactgtagcaattacagaaacctttccatcaacttgtccgactaacactataatagtatcttgaagtttagatttaaagtcatccatagttgaacgtatcgcttttggatttggaatttctacttctgttgctaaaactttcaaattattaatcaac

SEQ ID NO: 1035 - DNA, 181 bp, Staphylococcus epidermidis
  marker
tgatattaatgaagtgattatgctaaatcataatgaatttaaaattaatgatacatgcatcgaagcattttcattaccaaatatattaaatggtttaaataagtatattcactacaaaaacactaatgatttcccacaatatgagagaccacaatcacacaattacgaacttagtgatcag

SEQ ID NO: 1036 - DNA, 181 bp, Staphylococcus epidermidis
  marker
agaaaattctccgctaattgtaaatgtttgattaattgctctaagtagcttctcaagttgtctcatattcaaggctgtcggtgtaccacctccgacatacattgtttcaaggtctctattatttttaacttgcatctcgctaataagtgcgtctaagtattcatcaactggctgtttatcg

SEQ ID NO: 1037 - DNA, 178 bp, Staphylococcus epidermidis
  marker
atttttttgaataagtcgtctatcctctttgttaacacgtgcttctactttcgcgttctgtgttgcttcaccaaattgcacaatacctttgtgtaagttttggccattaggcgctttagttacgtcagttacatttatttcaaagctctcattaccaactgttcccttatctgcgacc

SEQ ID NO: 1038 - DNA, 177 bp, Staphylococcus epidermidis
  marker
gattaacttccccctttttgcaatagtaaggtaatcgtcaatagacaacttaacgatacgaatctattcgtgatggtttaatataagttcaacaaaaatacgggaattaaatatcgttatttgtcactcattctgttaaatttactttaatactcactgaaacatagatcgtatagt

SEQ ID NO: 1039 - DNA, 175 bp, Staphylococcus epidermidis
  marker
agctattggctttggatagctaaatttaaaatacgcttatattaagtttttaaatttttagttctcattaatgaatctgaacgacgaatttaatatgaatatgatttcattctttttgatgtatcatgattcattattagtgttgtcaaaatttcgaccttcaagtccagccaat

SEQ ID NO: 1040 - DNA, 172 bp, Staphylococcus epidermidis
  marker
ctttataacctgtcacttctatgtatctttgatatagtaacgtttttattactttaatgcaatatatctttgacataattaattaaatgtaaattctaacataactattatatctagttcagtagttcattccaacaattaaaaagtaataaattcaaatgaagttactttt

SEQ ID NO: 1041 - DNA, 169 bp, Staphylococcus epidermidis
  marker
gtaaagtcttgaatcataactatttataaagacatagtcttttacttcagcaatgatatttgtaatatgagattgttgaagtgctgtaataatatttttagaaatttccacatcaagtacttcatgtatcactttaaaatcgtttgcttttggatgatgtacaaatgct

SEQ ID NO: 1042 - DNA, 168 bp, Staphylococcus epidermidis
  marker
gatattgcaccgtgttgtttaacaggaagttgatcacgataatctttagctttaacgaagaaatcgtaaatactattactattttgttctcgtatcaaattttcaataccagtaatttgttctttaatctcgttaagtaaagataaaatatgattttgattatttaaa

SEQ ID NO: 1043 - DNA, 164 bp, Staphylococcus epidermidis
  marker
tactggtgatgaagctttattagttaattttaaaatagcaatagcttctccagcatttttacctctgattaaatcaagaacaagtcttactttacgaggtgcgattcttattgttctagcaaccgcttttgcttccatcaggatttcctcctctacttattaaa

SEQ ID NO: 1044 - DNA, 164 bp, Staphylococcus epidermidis
  marker
gaaatgaaaaatttaaaatcacttaaagttaacaacgatattgctcgtattgctgctatcaatctgtatgaagcaactgataaaggatcagacagtgtggagtttactgagaatgctttaacacaacaactggatgaacgccatgtaagttataagtcagcaag

SEQ ID NO: 1045 - DNA, 163 bp, Staphylococcus epidermidis
  marker
tctaatagcttcttcatcagaattaacattataaaaatctacaccggtaacttctttaacagcatcaacaatgtgaagtcgtttccatgaagattctaagtcaatttcttcatcattatattgtactttagctgatccaaacacttcttgagcaatgtgtctg

SEQ ID NO: 1046 - DNA, 162 bp, Staphylococcus epidermidis
  marker
ttgaatatcagtgatgtctttaatcatttcatgttctttaaaactatctaacattatattaacggcttcttcatgattatggatatctctgatatcagtaagcttctcgccattaacatgaatggtgaagatagaatcgcttaaaccaatacgttctatcac

SEQ ID NO: 1047 - DNA, 160 bp, Staphylococcus epidermidis
  marker
taatatgatatcgacatgcatgccatgttgctctaagaaattgtaattaacatgctcaatataagcatctatctctacatctttacgtatctcttttaaaactttctgtgcagcgattacttttggtagtacatcttctgcatcacgctctataaagagc

SEQ ID NO: 1048 - DNA, 157 bp, Staphylococcus epidermidis
  marker
ctatagtctagttagaaaaatgataaaagaatcaggagttcaattacatgatcaatttaatggtcaaacctttttagaaaccttccttgcaccaacaaaattgtatgtaaagcctattcttgaattaaagaaacatattgatatcaaagcgatgagc

SEQ ID NO: 1049 - DNA, 156 bp, Staphylococcus epidermidis
  marker
aatcaacattctcctttgctatataacgttggctcttttagtatagcatgaaaatgagaagaatgaataagaacaaatgttcttataaatattgaaatagaacacgtgttcttatataatgtttttgtaagggaggatcagttatgtatgattaca

SEQ ID NO: 1050 - DNA, 154 bp, Staphylococcus epidermidis
  marker
gatcttttttattatggtaagtaaagggcgcatatgtaccttccgtaccaactcttaacgtatccttgtctttactgcttgattgattatctttattgttagatgaattgttgccacaggctgctaaaacaaaaacaagtgcaacaatgcaaag

SEQ ID NO: 1051 - DNA, 154 bp, Staphylococcus epidermidis
  marker
attcaaagtcattaattattttgcaaatcgtctgtgtgacaaaaaagcattgtatagaacgttaagtgtatcgttaactcagtttattaaagaaagcgatcgacaactcaacttattcattgatgaatatgaacgtaagaaagatgtaaaactt

SEQ ID NO: 1052 - DNA, 153 bp, Staphylococcus epidermidis
  marker
gtttgattcatttgccataaatgtttgacgcataataattgtcctcctaaaaataaatgcttcgttcattaattgcagtacgaataaatcacattcgaacctatgtttattgcactaacaactatcattattgttacgatttaaaagcgtaag

SEQ ID NO: 1053 - DNA, 151 bp, Staphylococcus epidermidis
  marker
taaatgatttttaatattattaaactgtgtttcaatttcttcaagatgtaagaatgcacctttacctgttaaagcttcaattcttctaacaccggcacctgttccagattcactcacaatcttaaagagaccaatttccgcagtattattc

SEQ ID NO: 1054 - DNA, 151 bp, Staphylococcus epidermidis
  marker
gcaagttgggccatgttccctcgatagtccataaataagttatcgtcgtgttaatgatgaatgcgatgaaaatcaaaaataatctcagcatttcatcaacccctttttagctattttatgtcgttgtcagaaaatttgcaatatacaaaga

SEQ ID NO: 1055 - DNA, 151 bp, Staphylococcus epidermidis
  marker
caatccatattcaacagcattatcaaatgccaactgtgtttgctctggtcgcattgccatgccacctctatgtgcaaatatgtaaggtgcttgtcctgagaagaaaggtggaatagattttaattgttgcggtgatttatttttatttttt

SEQ ID NO: 1056 - DNA, 145 bp, Staphylococcus epidermidis
  marker
caacggattcaacaagaaattgcaagatgttattttaaaaggacagcaaccaattactgaaagaccaggtgaatacttggagccggtcgattttgaagcaatccgtcaagaattaagcgacatacaacaagacgaggtaacagaa

SEQ ID NO: 1057 - DNA, 142 bp, Staphylococcus epidermidis
  marker
ttgttgtccacctgaaagcatatgtgggtagctattaagttgctcttctaatccaatttttgttaataattctttagctcttgcttgagcttctttgctagacattccagcttctttacctattaaggtaagttggtctaaa

SEQ ID NO: 1058 - DNA, 142 bp, Staphylococcus epidermidis
  marker
cttatcttgaacctttttgtcccagcctcaaaaaaccacccacaatttgataacacaaattgtgggtggagaatataattaatcgataaaatgttattctactacttcaacatttaagtttacatcgatattgccacgtgta

SEQ ID NO: 1059 - DNA, 142 bp, Staphylococcus epidermidis
  marker
tttagcttcaagaacaaatattgcgcctactgttagtaaaatcaaggctacaatcaatcctagtattttcagccaagcaagtgaagtatcgtcttgacccacaaacactgattgtgcaaattgttctagactcgaaggtaaa

SEQ ID NO: 1060 - DNA, 141 bp, Staphylococcus epidermidis
  marker
caggcaattttagaaactctatatatgactgttgtttcgacgctttttgcatttgtctttggacttatattaggggtattactctttttatctgcgaaaagtaactcattggctgctaagattttctacacgattgtgtca

SEQ ID NO: 1061 - DNA, 134 bp, Staphylococcus epidermidis
  marker
ttccgattacaacgaggtaattgagagaattaaaaatcatcaattggacgaagcatatagaaaatcgctaatggttaaagttttccaacatacaaatgaatatgatcatgctattgttaactatttcaaagaca

SEQ ID NO: 1062 - DNA, 133 bp, Staphylococcus epidermidis
  marker
tccaatgtttttccaagctgtaattacaagccataatacaactataagtgaaatggctgatactgcacgatgactcagttctataattgtttgtattggtaaattttctggaagtagagcgccgttacataaa

SEQ ID NO: 1063 - DNA, 133 bp, Staphylococcus epidermidis
  marker
ggtgaaatccaattctgattttactgaaacacgatttcaacctggtgaacaattacttgtaaaacataataatactgaaattgtttatacggtcgcttcttatcgtatacataaaggatttcacatgttaagg

SEQ ID NO: 1064 - DNA, 131 bp, Staphylococcus epidermidis
  marker
gatatacaaagagagtccccctcgtcgtgcaacatatagaagcgaaaagataacgacttgaaggggatttatttaataataagtatcaaaatttgcgagggcttttatagcattctctcgatcttcgggac

SEQ ID NO: 1065 - DNA, 130 bp, Staphylococcus epidermidis
  marker
agagacagaagtccatccagcatttttagcgtatttgataccatctacaagtgcattattgtcaaatgcaccaattccaaagacattatggtatttgtgacctgttttagttgtgaatttaccttttgaa

SEQ ID NO: 1066 - DNA, 129 bp, Staphylococcus epidermidis
  marker
actaataaaattttggcagtgagatttttagatgcaaatacattggcaacactacaaccatataagttaaatagagcagaagatgagggacaaattagtgaaagttccgacgataaaattcctcatgaa

SEQ ID NO: 1067 - DNA, 127 bp, Staphylococcus epidermidis
  marker
acatgtctctaagttaaaatccatggtttctttttatgaggattaacttgtaagtttgaattcaataacaatgtatcttataattgataatggttatcatgtataaaataaagggagcgaaatacat

SEQ ID NO: 1068 - DNA, 124 bp, Staphylococcus epidermidis
  marker
tttacctaaattgtacatgtaatcaagagcttctctcggtcctggtcccacaggtgcatcagcagtggctttagaatcatctctgatgctttctatagataataaacctttaagatcttcaatc

SEQ ID NO: 1069 - DNA, 122 bp, Staphylococcus epidermidis
  marker
caataacttatagaagtgttataatcgtctcgaggtgcaaaatttatatgttgaaaacgattttaaacgaattgaatttagctataggttttggtaaagttaagttgtaaatattttgttag

SEQ ID NO: 1070 - DNA, 121 bp, Staphylococcus epidermidis
  marker
aggattggacccattaacaactaaactagcagttgtagcagatacgaaaaggcaaggttcggtcgttctagcagcaactccaaagttaaaagaattaggtattaaaacgggatcaagactt

SEQ ID NO: 1071 - DNA, 121 bp, Staphylococcus epidermidis
  marker
gccatatgactgtgttcgaagctgttttaagttcggatactcctacattaagaattataaaaaaatatgaagaagcagttaatcgctatgcgttagatcaaagtgactctaattttaataa

SEQ ID NO: 1072 - DNA, 120 bp, Staphylococcus epidermidis
  marker
aaaatcgatattcgtcgtggagaaataatacagtcagatatcgagagagctgaagatgataaagcatactttaaaagatatgcattaacagctagtggcgtatcaccacgaccaatacca

SEQ ID NO: 1073 - DNA, 119 bp, Staphylococcus epidermidis
  marker
taaaaatcttgataaagacatcattcagtcagtggtagatactaagattgttcaaccagtacgaggagctaaaaaagacatgattaatttagcgaatcacaatgctgaagtacaactcg

SEQ ID NO: 1074 - DNA, 118 bp, Staphylococcus epidermidis
  marker
ttcaaacaacattaacaacgttacgtgcaatggatacaactgcatatgaaattggtgagattataaaagatgatgatacacctattcatttattggaggtagaatagtgaccaatata

SEQ ID NO: 1075 - DNA, 112 bp, Staphylococcus epidermidis
  marker
atgtttagcatgaatttgataggctaacgcgccagcaaaagataaaaacaatagatttctagctggtacgaaagtattaggaataccatcatcattatcttcaatacttaac

SEQ ID NO: 1076 - DNA, 109 bp, Staphylococcus epidermidis
  marker
ttggtgcatcattggtgtttctacttccaagaatccttgtttatttaaatagtttctcatttcttgaattattttactacgattaataaacgtttgcgtactatcttca

SEQ ID NO: 1077 - DNA, 104 bp, Staphylococcus epidermidis
  marker
gtcttaagtgcgctttattagtatgtcgttcaaataaggatttcccctcgtatactacatcacctgatgtttgagataacaaaccacctaaaatagttaataag

SEQ ID NO: 1078 - DNA, 103 bp, Staphylococcus epidermidis
  marker
cctctccatttctataatattactattctatttttcattaatcacatttaaaaatcgctgaagctcttctgttttggggtgattaaatatatcttcaggcgta

SEQ ID NO: 1079 - DNA, 100 bp, Staphylococcus epidermidis
  marker
cgattagcagacacagttaacttattattagttcctcctgatggtttagaaggttgtgacggttttgtagatgttgtgccccaaggtgctacttgcttcg

SEQ ID NO: 1080 - DNA, 2689 bp, Staphylococcus capitis
  marker
accaggcgcttccggcgttgcctctttacgtggcatattttctctactttcctcacttgtgtcactgtttcgaattatatcgttcgctacaactacgctttctggataaacagcttgataattaattgttactaaaccggattgtggttcgatatttataccaggaacactattattaagtgaccaattatcattagttttagtagcaataattgatgtactctcattagcagtattttgatatgtaatatttaacttatctgctttattagctggtgttatagttaaatttggaatcaggtaatttatttcaataattggtttggatggtgcattatattttagactatttttcaatgtatctaacgtattagtaacattattgatagtttcttgggatgcttgattttctatagcaacattattctgttgttcattgataatatttctagcttcggttaatttgtcttgaagtgcacgccatgaatctgtggtaaaatcagcctcatttaaatcgtgtaagtagttatcaacttcatttactttactttgtaattctgttttattcatttgaattgtcacagtttgtaaattaacggtattatctccggttctttgagtatctcttcctctaaatgttgcattagttctataactaacatgtccatttaaattaactattttaggtattgttgctttaaattctactgtataggagagatctttcctctctcctggatttaagttactaattgacattcttaatttattagtatttacatctaaattaccggttcctccactactagaaatgagttttgaatttgctggtaatataacttcataatatgtatctcttgattgattatgccctttattttcaacagataaattaactgttgcacgtgcaaaattatcattaggactattaggctgagttatatattctacctgtgccacattagaagtgatataggatccactatttattcttacatcactaactgaacccccatgataataagatgaattatcaccaaatccatgttctttcgaagaccgttgtacactaattcgaccagtgttggatataggtaaaaaagaaattcttactctattcatatcgcttggtatgttaaccattgcagataatttaccggtagggtacggtcccataccatttagacgattatcaaataagacgcgatcctgctctatattactaatttttaatttagcacctgatgcaccatctgaaaatactggacttgtagatataaagttaacgtttaattccgaaccaggtaccacatctatatcttgataaatacctgctactttagcatcattgacacttctatcacgaccgttattcgttcttgcaagtacaaccccgtatggagcaccattattgctcataaaacttgaataatctactgcgcttggtgtataaaacataggatactcaggattaggatcagttgagtaactatgccaattatctacattcgtaactacagttaatctctttgaccttgatggtaatataccaccagatacctggctaaagtttccattttgaatttctggattaacttcatttgctttcaatggatcattagatacgttattttcaggagcacttctaaatgatgatgtatctcttttatgtctaatattcgaatagtttgaaatgttattattcttagttaaatgttgtgattgaacaccgtttgactgacgatttggaagtaaagattctttattatgtaatttacctgcactatttaaaaatttatgataataatcatcaacctgttgttggctttgaggattatttaaaatagattcagcttcttgtaaatcagcgcgaaataattcaaccgaatcttctgtcttgttacttaaatctaaagatttgtattgatttaaaattttttcaagttgactagtattaataacgtgttgagtattagttttagtagttgaaagtttattttcaatatcttgattattagttagattatcatttaaagattttccattttcaatattaatttgatgactggtactatcactaactttttgattgatggtggtattattttgttcaatactgtcagcttttgcgtaatttatgttagacatcatgataaaacctattattgctacactagctgctccaaaaccttgatattttctaatagaaaaacgtgtgatttttttatctaagttgttgattcttttgttttccatcattttttctcctcaaatataaagaatttaaattaacccaacaatattcaacctatattttattattgataaaatatatttcattgtgttccttaaaatataccaccattctatattttgtgcaattgtttattttgggaattttactatttgtacataaaaaaaagagtgtgggtttagctccacactcaatctataattctattctttgattttatttctaaaaataccaattaatcctaaacctgctagtaacattaataatgctggattaaattcttgttctttaactcctgtttcaggtaattctttcttagaagttttatgattatgagatgttttatcatctttatcttcattacgttttgatatttttttagtaggtttaattacttctaatgtttgcttatgttgttttaatttaactttttta

SEQ ID NO: 1081 - DNA, 1207 bp, Staphylococcus capitis
  marker
aatatggtgggcaactattacctaaagactctgaaattttaagtagttatatagacgaaattgaaaatccattagatatagaaatcggtagctttgataagttagtagctaaagatcaaattaattttgcaagcaaagatgttagaaataattacataaatgaagttattagggctacgggaaacattgaaaaaaagaatgctaaaacagtactaactagtttacatggaacaagcttgcctatagtttctgacattttggacaaactcaattatgataattatgttattgctcaatcacaatctattcctgacggaacatttcctacactaaatagtcctaaccctgaggacgaatcggcatttgaagtagggaagaagctagctgaagaaagtgatgcacaactcattattgctactgatcctgacgcagatagattagggatagtagaacgtttagataatggagaatttaaatttttcagtggtaatgaaatagggcttatattaatgaaattaaggtatcaagacctaattgatgcttcatatgaagatttatatattgttaagtccatagtaactagtgaactaagtggaaaattggcggatgttttaaatgttaatgtttataatgtgcttacaggatttaagtatatttcggaaattttaaatgataagagccatactaatgaaaaactattgttagcatttgaagaaagtaatggctatatggttgaaccatttgtaagagataaggatgctcttcaaatcgtacctttaatcatcaaatttaaaaatctactttacgaaaataatattactttaaaagatacacttgatgatatatatcgtacagtcggtcattatcaaaatgtcaatttaagtcctgtatttgaaggtgcggatgggcagcgtaaaatagaaacaattataaattcatttagaaataaagaaatacatcaagtgtgtgggttagatgtaaaagcaattgaggattaccaattaggaacaattaagtatatagaaagtgggaaagaaaaagccacttacttacctaatgcaaacttaatacgtctaatatttgatgaaggttttatagctattaggccatcaggtacagagcctaaaattaagatatatttttcactaaacgtaaataacattgatagtttaattaaagaattccaagagacttatattgaatatta

SEQ ID NO: 1082 - DNA, 783 bp, Staphylococcus capitis
  marker
tactctctctccagagttagttacagctgatctagatttagttgagaatgttgaacgattttgtgttgcgttacttttttgattaggatgtttctttaaatattgttggtagccataacccattgttcctttttcacttgttgactgacttttagaagattcctctgcatttgcgttaaccatgcccaaacttgtcgctaacattgaaaatgaaattatcgagtatgtaaccttctttaacataaatgtgctccttttttattgagaatttagaaattacgtacaattatatgtaaaatgtaatttttatgctataacaattaaactcaattcgcaacaacgcatttagtacgatttgtaatgtttaaatattaagttatacggaacataaaaagttcttaattttataaaaatttattattcgaaatgagcagggatataaaggagatgtactgaaatattcattcttaatatcttcatctgtatttattcgatacttattacttcttgctttatctatgagacctgtaaccccatcgctattgtatctattaatccaattataaagcgcacgaatagggactttagttgactcactaatttctttcactgattctaatcttttaaaataaggttcaattttataatatctatgcatagcttttttacatacctcttcactaaaattagataaattcttactcatttcagtatcttcataaattaattttttatacttaaaagttaataatgcgataaatgagtaaaataacaaataaattt

SEQ ID NO: 1083 - DNA, 766 bp, Staphylococcus capitis
  marker
cacgatttatctcacaaggtaccaaattaaggtgccttgatttttttataaatttttaaagtaaaaattttgttctcctcgttgttatatatgaggtgatgaaatgttaatagcaatgaatagaatgaatgagcgagttttagcgaaaaatgcgaagagaaatcaaatatatcggtgtccttattgtctaggggaagttatattacgacatggagttaaagttatacctcattttgcacataaagttaaaagtactagactttgttataaagctgaaacgtataatcattaccaattaaaaatgctattagcacaaaaatttgaagcaataaattatgatgttgatattgaacccttttttaaatgtatcaagcaatatcctgatttagtgattaaccaaagacacgccatcgaaattcagtgttccacaattagtacgactgaaataattgaaagaacccttggtttaaaaagtataggcttaaaggtttattggataatcaatgatgtgaaaaaaagaggggattttattgaacttacacaatttcaaactacttttattaatcctattcatcgtaccctaataacctgggacttcacaaaatcaagactcatagtttacacgcaccttcaaaatatcgctggaaaaaaatttatttgcaaaaaacataccatacaaattaaacaacttttcaatacatatcaatcagaacaagcacaaatctataaattatctaaaagaacaatcaataattatattctacag

SEQ ID NO: 1084 - DNA, 742 bp, Staphylococcus capitis
  marker
tgttcgtccttcagacttttgcgctgaatgattgttagattgaagatgacttgaagatgttttctgtgtctgttctgtatctgaagttttggcatggttttctggttgaggttgattatctttagatgatgattcttcagattgatagcccatttgtttatttatagattgacgatacatgtttacatcatgtgcatttttaggttgattcctttgtgatttactagttgcattattgctattttgtagagaatcttgtttaggtggaatcactccgttttccaatggacgtcgttgcttagttccaaaaatagctgacggaacgtcgctcgctttgaaactaccaccatgatatgtaagttcagaattcgtagaggattggagtttactgttagatttcaaacgttcagattgtaatttcatgcgagaatttgacttattattatatgaacgataatcatcagattgtctgttattagaacttcttttagaacgacttggctcgcgatgatgcatttgattttcattacgatttgaatgttgattaatatgatcatgctcacgcatttgagatgaacgtctacggcgatgtcttttcccagaattatcaactaaattacgtgtagagtcatcatcttgtgtgtcatatgttcttgaaccataattagcattgtattcagaagtttcatagtttttatcattatctagatcgttatatgaagcttcttcagatacatgcata

SEQ ID NO: 1085 - DNA, 625 bp, Staphylococcus capitis
  marker
actattaaaaatatattcattttgtaataaatatatccgaataaaatctaagcctttaaatgaatgtttgctaaattcatttaaaggctcttatagtattatttcacactgccaattccgttaagttcttcattataaggcaatgttaattctttgcacgtgatgactttaccatcttcattaaagacaaattctgcataaacttctactttacctttatcaccatttttcttttctacatgaacatcgtagcgtaaaaaaatcgtgttttgagactcatctatgagcatggttttaaattcttcaatagaaagacgagccacaacttctttcagtttcttaagatgatctgtgaactcattaatatcagacgtttgatgatctgtggtttgaacataagaaggggcaaagtacgtatcaattttattaacatcaagattgattaaaatatcattataaagcttttcaattgtagattttaaatcatctctattcatcacttatctcctctataaagtaattattttaattcttcaccaatttgatatgtgtgatacaaagcttctataatttcattatgaatgacatgaaatggtctttcaaatcttttagcaacttgttttac

SEQ ID NO: 1086 - DNA, 617 bp, Staphylococcus capitis
  marker
cgttttcaaaggtgaaacggatggaccaactaatctgtaacccatacgatccgactgatctgaaaccttaaattcagaattgataaatgtatctactgcttcctctgaaaataaactaaattgaggacctttaataacatgaatagtattatcctctactaatggtatatagtaggttgctttacctaaattctcattataagatgcattactttgagtaggtataatgtcatgctttttaagcgctcgtccttcaaaaccaccaagtccacttctagtatgagtagaataactctctgcaatcctttctatttttaacggatgaccaaacacaagatatcctctcgcaccttcagtaacctgaccgatttctaatacatcgttagtctgtactttatatactacttgtgaatcaatggaattaccgtttaattttgcattggatgttccaccgataaatgcaaaagtattttctttaagaaactgtactttagggccaataacagtgtattcaatcgcaggtccatcattaccaattaatttttgagccattttaaaactataaaagtctaaagcaccagctccggaaaatcctaaatcttgataacctatacgtc

SEQ ID NO: 1087 - DNA, 589 bp, Staphylococcus capitis
  marker
cgaaatggcaaatcaaaggcaaaaaaatagacatgaagagaccaatcaaacagatgcattaaaaccttcttcaatgagcaaaaaatcttctaattctaaagaattaggtgatcacactcaaacacatttaacttcagaggatagaccacgaagtgaagttgaagatgaacaagtaaatcataatcataaagaaacaagagtgccatattcaatcactaaccaaccgaaggacttagagggtgaagacaaaaccgctaaaaccgctaaagaaaatgatgacaacgttcaacaagaacagtctagtataaatgaaacaacagataaaaaagaggttagcactaaagatagtgattatgagaacaataatcagatagaaacttctaatgatataacagataagagaaaaaataatgataagcgtcatttagattctgaacaaaacaaagaaaagccatattcatctataaatcatcattcagatgataaggaaaatgatgatgacaaaggtaatgataaatattcaaagaaagattctgtaaaaacgagtaataaaaatgataattttgaatacatcaagaatgcaataatt

SEQ ID NO: 1088 - DNA, 542 bp, Staphylococcus capitis
  marker
gatttaaaattaataagaacgggctataaatacccaaaggagtattagcgcaaagatgttgtgaattagaaatcatctttgtgctttttattttaataatagggattctatagattcatgtttttgctgtaaattcttagctaagtttttcaagagttgcttatatgtgatttttaaatagtatacgtaattggttagtaaataagggggagggaattttagatatattataagtttaaattttatgtccttgagtttttcctgagtaagagggaatttttcataaaaaatagcgtagagaggataatgaatttatgttttataactaaaacggctgacattattaaagtagttgagactatgaaacaataatgaagtaactaacttcaaaaaaattaaaatttctttaaagtttgtgaaatggctatagtaagattgtataatttatcgcaaagttcatttttgtctctaaaaacgacagttatttcgatataaaatcataaagttcggttattagagatatagtgtagtgattttgttaa

SEQ ID NO: 1089 - DNA, 536 bp, Staphylococcus capitis
  marker
caagaaaaacagcgtacaaatcattagatattcacctaaaaagacgattagaataaaaacaaacacgcatattcaataaagatatttttagccaatatattaaatcagactgagaaattaactattatctcagtctgatttttttaatatatagttcaatatatataccttactatttacaatagctcagtgcgttaaggaataaatcttcgtaatctttatctacaggtgagagtacaactgtacaattaggatattgagattcgaaatctacaacagttgctcctttagtgtaatgaccagctaattctatttgaacatctgcttctttgacattaaatgcttgaggttgcagtaaatataaaatagtaaacacatcataaattttaacgccatattcggagtcttcgcttcgatagtgttgaaataaatcatgtaacatttgtcctgtttcattttgatttttaaagcttttaacgtaatcatgcgtaaatatggcttctctagctaagtctaatcctatcattgccagaggc

SEQ ID NO: 1090 - DNA, 506 bp, Staphylococcus capitis
  marker
cttaagtcgatttaaatattgttcattattcagattccattcattcaatttacgaattaatactgaccatagataatcttttgaaacttctccatcaggtgtgacatattgaggcagtaacgattgatgatataccaattcagctttacataagtctacgatgtcttcagtattttgttttattttctcatcgatttctaactcttcaaattccttctgatcaggaaaatgctcaccaaaatctttactatcgttaataatatctaatttagaattatctttgatggcttgtaaagcagaaatggtatcagcgtcttctctattcaaatatcttgctgacttaagccatactttttttctattaacaatatcattactcgtatgattgatataaacatgtattttatcattaaatgcttcaataatttgtttatgagtattatcaatatctttgaagataataattagatttttatcgtaacgttttaaccattctaaaggtactt

SEQ ID NO: 1091 - DNA, 471 bp, Staphylococcus capitis
  marker
tgtactttgaacaattgatctaaagccatctcattttgcgtatcagaatattgtagatgcttaggtaaaaactgcattaaccattcatataaactagacaaaccatacgccaataaaaaagcgataataataatgaaccatcgtcgtttcaagtattgtaaaccttttttaaacctctctccaaatgtatggatgtgtaaaaagtaaaatacaaatatcacaacaacataagccattaactgcgccaatgtactaatcatcgctaattgtaactgtgacatatgttttagaaaaagcgcacctagcgccatacctgcaacgctaaatagaaaaagtcctaccaatactactgcaattagacttaaatctctccacgcaatatcactaaatttatattttttcttaacttctttctgcctcatagacgtttcctttctattactcaatcatttttaaaatttattggaggaa

SEQ ID NO: 1092 - DNA, 424 bp, Staphylococcus capitis
  marker
cgtacgagttcatatgaaatagaaaatattgaatcaaaagtgatagatttaaatgactataatgaagatcaagatttattaaatgagacgcattatgatcgtaaagctgtcgagtattgggcagatgaaattatatctaataacaaatttaatctaactattgatagtattgaagacattatttgtcagccacatccatttgctcaattacttcatgatggtataaaagctgcgtatgattataaaatctcatgtgtgcacctacctataaacggagaggaaggactaggtggagttattcgcaatagggatttatatgaggcatatccacatccagacaaacctgttgatctaacggtaagagggaaaaacataaaagatattctagagtatagctattcccatatagaattcgaacaaggaa

SEQ ID NO: 1093 - DNA, 422 bp, Staphylococcus capitis
  marker
tgtcgaagacgcctctgtactcacataattaatgtcgccatattggtctatcgctggatgatggtctatcttcaatacttttaaaccattctgataacgttggtcgtcaatacgcggagaatttgcagtgtcacaaacgattaccaatgcttctttataaacttcgtctgaaatttcatcaaaagtacctataaattctaaagatggttcattttctccgactgcataaatatgcttatttggatatttagcctctaaataatatttaagtcctaattgtgatccataagcgtcagggtctggtctaacatgacgatggatgatgatcgtatcgttttgttcaatttcttgcatcatatcattcataatattcttcattttaaattactcccttaaaatactcatttattgctcaaaagcct

SEQ ID NO: 1094 - DNA, 402 bp, Staphylococcus capitis
  marker
ataataaattgaaaggtctgggttgttcctagacctttttaatatgtgaaggagactattatggaaaatgaattaaaaattaaacacgcatgtaactatatgaaaatggttcataaagatgatcacactgggcacgatatcgcgcatgtagaacgggttcatacattagcaaagtatatcgctttaaatgagggtttagtacatacaacgattatagaacttgccgctttattacatgacacagtggatagcaaaataacgaatgaagaacaagcatatgataaactttctacttttctagaaacgattgacttaacccaagatgatattcaacatgttttacatatcatacaaaatatgagttaccgtggtggtaaaaacaatcaagccacattatcgatt

SEQ ID NO: 1095 - DNA, 376 bp, Staphylococcus capitis
  marker
attgaataattaaatagttagttagtaaaagcaaaacttcaaagctttagttacccattactaacgctaaccaacttcgataggctgggacatgaatcttgtcccggtcttaattcttgtttaaattgataactttaaaaatttaaatttttttattatattcatgcaacactatcctactattgtaatatattcatactttgctaatgggattgattttaaaaagtatttaacaagatacgcatgttaaaatttgtgtttttctttataaaataaaagaatagacacgaattcagttctacaatacgtgattaattaagatagtcactgttagaagttaaaaagatttgacattcacatatttgagttaatggtt

SEQ ID NO: 1096 - DNA, 372 bp, Staphylococcus capitis
  marker
tcgttctccattttttattactttaaaggtatatttattgtaatggtagtacctttattcaattgtgattgaatatctaatttaccattcaatgtatgtgtccgttgtttaagattattgataccacttgaagcattaacatttacttcatgcaagttaaatccctttcctaaatctataatttcaataatgagattatcctgtctttgcgttagatttaatgagacttcattagtatcggcatgctttctgacattattcatcgcctcttgtatcatacgataaatattttcttctacatgattagttaaattgattaagccatcaacatggacgtctaaatttagatttaaaacatcactatagttattt

SEQ ID NO: 1097 - DNA, 359 bp, Staphylococcus capitis
  marker
aaaatgattttgaaagcaaacacatatcaattaagaaaagcgctttcaattacctatgtttaaattataaacactatacaacaataattcaacatatattgtttgaactttgtttatttaatgtttgttttcaaacatttagtgaacttagtgtttatactggctttgtaaatcaacaaaaaagagcggaaatgaaatctcattctcaaagaatgaattcatttaccgctctataaaggataattaattaatagatattaaattctatattttagtcaatgacctcaacatatttttcaacttgttctgtcttttccgaattattattatccattaataccgcatttaattcttttaat

SEQ ID NO: 1098 - DNA, 351 bp, Staphylococcus capitis
  marker
ttcggcagagtaccacgatgtcattatcattgctttaacaatgatagttgctatggtcattttattttcaatgaaaaatggcattaaactactgcaagtcggtgagttaaaaagccaatctttaggtcttaatgttcaaaatgttatgttcattgtgttggcagtgtcatctatgataactgcagtagtagttgcatatgtagggattataggatttataggtatgatcgtaccgcaattactaagacgtttttattggcaatatgagctaggaacgcagatggtacttaatcttattgtcggtagcacagtgatggtcgtggcagattttataggcggaacgatgataca

SEQ ID NO: 1099 - DNA, 348 bp, Staphylococcus capitis
  marker
cttcttctgaaaatgaagttcaaaattatctaatggtaacgttttaagttcgctttcaattttatgtgggtcagcccctaaatcgactaaagctgacaatagcatgtcaccggctatgcctgcatgacaatctaagtaaattgcatttgccatattgatgctccattctagttattttctatcatcttcactatcattccagcgttatatcctccaccaaagccattatcaatattgagtacacttgtaccaggtgcacatgcgttaatcatggaaagtagtgtagtgacgccgtctaaatttgcaccatagccaacgctggtagggacggcatagatgggatgatcg

SEQ ID NO: 1100 - DNA, 333 bp, Staphylococcus capitis
  marker
cgaatctactgcaagccaatttgatattccgaatacatggaaattaatcgctcaaatgcctttcggtgatgtacgtgagagtgcgaatgaaaaagaaattaaacctgtagaagatcgttttattattaaaaaataatttaattaactgcgtctgtgtaggtattacacagacgcattttttgcgtttaatacgtaactttagtatcttataaataactcgtaatagggagtgaagaagatgaaaattcaactttttcaatttcatgtaacttatggaaatgctaatgaaaatgaatccaaaataaaaaaatggtttaaagaatacttgaacga

SEQ ID NO: 1101 - DNA, 326 bp, Staphylococcus capitis
  marker
catactaaatacgcattatcgaaatttaggcgtaggtgtagattttaataaagagaagcaaccattttggactgagaattatacagaataagagtttatcttaagtagataagggtaaaataaattcgtaaggatgtagataagcatgaaaacgaataaagataaacaacccgatatacttgataaaataaaagatgtattaaacaaagattctaaacagaagacaaggtagttcgataagaactaccttgtcttttagtatttaaaatatgagatttttatagaggtcttgatataggagggcttaaatagagagaaattgatag

SEQ ID NO: 1102 - DNA, 322 bp, Staphylococcus capitis
  marker
gaaactttgaacgtatttaatcaagaagtagaagttgaaaaaatttggatagaatcgcataaatcaatattaagtaccacaccagaattaacatcttactattatgtcattcttcatttatcaaaacaccctcttataccaatcaaacaaggagacatgcttttttatattcatatcaaacaacttttattacatgaacaacttttaaaaatcaaaccttcgacttcctaattattataaatttatctttaatttcgtttatcaacgtttcgatacattgcacttatttaaatctcacataacttaaaacatcatgtgcttt

SEQ ID NO: 1103 - DNA, 313 bp, Staphylococcus capitis
  marker
aaaacgaaattctgaagtgacaaatgacgacttaacaaccgcccatccttcatctaataaggaccattacaatactaatgattcagaaattagagaaggtatcaataattaccaagatacaaatactactttatcaaaccatgaaaatgagcaagaatttacctctcataatatacaacgttccgaagaggataattactctcaagttcaaaaagacatacttaatgatatggaggacgattaccttttaaatactgaatcaacctctaataacgaagaagatattaaaggtacagtgagtcaaaatcctaag

SEQ ID NO: 1104 - DNA, 307 bp, Staphylococcus capitis
  marker
atctagcgcgtcaaaatctaagacatcatctaatagtggttcagtgtacactgtaaaagcgggagactcattatcatctattgcagctaaatacggaactacttacaaaaatattatgaagttaaatggtttaaataacttcttaattgtacctggtcagaagttaaaggtttctggatcagtatcaacgtctaaatctacaagtggctctaaaaaagcgacttcaagtagctcaggtcgtacatctacgtacactgttcaatatggtgactctttatcattaattgcaagtaagtacggtacttca

SEQ ID NO: 1105 - DNA, 305 bp, Staphylococcus capitis
  marker
aataccgataatcaggccaaactttagcttattgcgtttaatttcattccatgcaagaaacatataatacctcctttgcctgcattattaatttagtatagcagttattaaactatgggagataataaatgtacttctgagaatttgcggtcagaaatcatacaactaaatctaaaaagctaagcaatatagcgtttgtaactaattttagataaaaatcattatcctttcattattttttagactactcgtagactcccttttcaaaaatgatagctattaaaattcattttgtgtatgttcac

SEQ ID NO: 1106 - DNA, 296 bp, Staphylococcus capitis
  marker
atgaacttgagcaacgaacacaacttaagcgtcaaactctgatacatatagagaataatgattttgatttattagccaaaaaggattacacagagggatttattcgtaaatatgctaatgtagtcaacattgaacctaatcaacttattgaggctcatcgtgacgaaataccaaataatcagaatcaaattgatgaattaattgctgctttctcgaacggtgaagctccctcgtatcgaagtaagtcaaaagaaacgatgcaattgataatgctaattggttttatagtaatagtt

SEQ ID NO: 1107 - DNA, 289 bp, Staphylococcus capitis
  marker
ttgggaatttacctgtacttcaccacgttgacccatttttacgtcagtattctctagacctaatccatcggtgttaggtttacgtccagttgctagtaacactgcatcagctttaaatttaccatgattggtatgaacgattgttgagtcgccttcattagaaaatgcagttgtttcaacgtttgtatgaactgaaatccctttgtcttgcaaatcttgaagtgctaggtcagccacctctcggtcctcacgaggcattatcacatcaccatgttctaatatagtcact

SEQ ID NO: 1108 - DNA, 286 bp, Staphylococcus capitis
  marker
ttagacgtattgcaagagagaatgtatcaatgtagtactttgattttatatgaatctccacatcgtgttactgacacactcaaagcaatagctaaagttgataatataagaaaaatagctataggcagagaactgactaaaagatttgagcaacttatgactttaccagttgagcacatgctagaaatgattcaaagtggtgacattccactaaaaggtgaatttgtgattctaattgaaggcgcacgtcctttagtcaatcactcatggtttgaggaattaagta

SEQ ID NO: 1109 - DNA, 286 bp, Staphylococcus capitis
  marker
attatcactttaaatttgattaggtattatcatttttcctactttagtgtttaataactcttttaacattttagattatgaaataaactgaagcgagtgttatcacccgcttcattattacacatattcaataatcccatggctacgtaaagaatcttgaacgtctatcacgcgttggttaagagagcctttataaggtaaattgggtttgtatagctgatacataaatagtccatcaaccaatatatcagtaagttcaagtaattctcgtcgttcatccgtttga

SEQ ID NO: 1110 - DNA, 286 bp, Staphylococcus capitis
  marker
tgttagtattatgcttataatatatagaagagttaagtttcatccttcaacttttaaaaattctggaccacttcaatggccaggtaaaaaggcgtagtgtttatagtgagacgattaaataaacaaaatcgattttccataaatcctttgtggcaagtttataaaatagtgaagtttcctaaggtatttaaacaaacttgtattattgaaatttctcgttttataccaagtatgagtttaaaacgttatatttatcgtaagtttttaaaaatgactataggtcaga

SEQ ID NO: 1111 - DNA, 281 bp, Staphylococcus capitis
  marker
taagcgaagccaaatggagaatatgttaaaaggtatgaatttaccattttaataaacatttttaaaacatcggacaattttgttgattgttcgatgatttattaattgtggaaaaccctagctaaaagctagtgtgtaagtcccactaactaaataaatataaaggttcgcctgagctaaagctcatatacgccgtgattgattgggaattatgcttataataccctaatcaattgtgcgggggcgagaagacgaattcatgatgaattctgtctcgctcc

SEQ ID NO: 1112 - DNA, 275 bp, Staphylococcus capitis
  marker
tagctcaaaaagtcagtggtctttcagacactgacttttttaatatgattttgttactatatgtataaagaaaaatgagaaaagagattatgatgaaaagaattcgaagtatagtcatatggttaatcattctattaattagtgttttaatcagtttatggtgggacttaggaagccttaatgatgcatttaatcaaactattttattaaaggtaagacttcctagagttcttgaagctatgcttactggtgcgacactcactatagctgggcat

SEQ ID NO: 1113 - DNA, 272 bp, Staphylococcus capitis
  marker
tagcagcagcttcagtgattactacactgtcagcgcttgtaatatctaaaacgtttaatccttgtgcagttgaaacttgtactccagggatgttacgtgctgataattcaacatttacatcttcgtcttcagtaacaactaaaactttttttggttgttcaagagtagataaaacatttttgaattcttttgtttttggagcgtcaaaaccgaaagaatcaacaactgtaaatccattttcttgaactttgaaagataatgcagaacgtaaa

SEQ ID NO: 1114 - DNA, 267 bp, Staphylococcus capitis
  marker
agcacagaggcctttgcttttaaaattttgaatatgtaatatttcacataattatgttagcaatctgaatatcatactaacactaatatgtgcacacgtgaacttcggcagttatataagtctataccctatattaatttattaaacatcagtcaacttacaaagtcatatttttctatgttaacttttttataaaatagagcctaaataaatatttaccatctaaaagttaaatttcgatgaaaaaataaatcaaaccgcaaaaat

SEQ ID NO: 1115 - DNA, 265 bp, Staphylococcus capitis
  marker
accctcttgcaaagcgaatttcacagaaatattcccgtagtcggtatcaatgtctctaaattctcgatctagtatatttctacgaactgcgtaactgcgaactccgagagaagatgtttcttgtaggattaaagtttcaaatttagatgcgttctcagttttacagattaaggttaattgtgtacttggacgtccttttttcataaatattggagtgtagtaaatatctagtgcaccatgttcgagtgctatatccatgaagtgt

SEQ ID NO: 1116 - DNA, 261 bp, Staphylococcus capitis
  marker
cgatgaggtgaaacgttttcatttcaaatattaaaaccctcattatgttctaaagtgattagaagtaatgagggaatatataatgaattaagcatttttatatttacttttaatagcttgtacaattgctatagctgttaaaataaataaaattacacttaacgcaatagtgaatggactaattgaaacaaaaaatcctaaaattccagttaagctattataaaagctattaagtgtatagataagaatacctgtaatggc

SEQ ID NO: 1117 - DNA, 244 bp, Staphylococcus capitis
  marker
cccaatttctttcatcgtagcagatgggaatgggccaaatgatgatactaaacttttcgcaaaggccgcaccagttggcgtcgttaactcactttgaacatcaaatttagctaatggaacgtctttaagtatctcagcagtggcaggtgctggtacggggtagataccatgggcgatattgattttgccattacctgtaggaataggcgagcaatataattcgtcaatatttaataattctaaa

SEQ ID NO: 1118 - DNA, 240 bp, Staphylococcus capitis
  marker
ctcaaattgtaaacgtttaataatagcgttataatcgtactgattaagtaattaaaaggagtgttagatgtgcttggcttctcagtttatttaggaaatgctttagataaagagtatattcttaacatggcttctatgggttatgatgtgatctttacatctttacaaatccctgaagaaaacaagcaacatcagttgtcatattttggggaattatgtcagcttctttcatcatataat

SEQ ID NO: 1119 - DNA, 238 bp, Staphylococcus capitis
  marker
catcaataaatctaatttttagtgactgttttaattcctctacctttgaatggaaaagaaagcttatttctatataatttgtcgacttgccactttgatattctagcaaatttaaaaaaagtcatgtaaaatcaatgtagactatttattaaccattaaattatgattttatatagattcatgaatggtttatgctacaaatgaatcattcatatatcatattaatacgcgcatgatt

SEQ ID NO: 1120 - DNA, 237 bp, Staphylococcus capitis
  marker
taagttaatagcttcgaaaagaacgctattattaggttcaatagcgaatactgaatcgcttaattcaactgaaccagatttagatccgtctacttttaaaacatcataattagccattatgcaatttcctcctttcgcttcttgaattatttattaccttttttaattgaagttgtgatttctactaagccttttttaggtccaggtacgttacctttaactaaaattacgctattg

SEQ ID NO: 1121 - DNA, 231 bp, Staphylococcus capitis
  marker
gataaagttagaaacttaatgattgatgaaataaaacatcatttagactattatgaagaaacagttgatagtacagatgcaaatcgattgtacttcttaaagcaacacacactagttgatgaactttatttcaatgaagacaatgagacttatagtattaaaggttataaaaaataaagaaggaagaaaaaatcatggaagaaatgaccaaattaattgaagaagttgaaa

SEQ ID NO: 1122 - DNA, 228 bp, Staphylococcus capitis
  marker
ttgaaattatatgaaatagactattttaaaaatgatacctcactatttattgattggattgatcaagctgaggcggttatctctgaaaaagttgatttggcagaggtagacagatatttagctgcatttgtatatatgcattataaacataccaatcatgctatgactaagaaacaaattattgattctttcgaagtcacgcgatataaattagataaaacgattgcc

SEQ ID NO: 1123 - DNA, 212 bp, Staphylococcus capitis
  marker
taaagcaaaataatatagcttaataaaatacagcatgagagagtgaatgcaacattgcatttactctctttttaatctgtaattgaaataagctggcctcaattatataaaaaatcactcaacatcctagaaaagataatgttgagtgatttttatgactaatttttactatttaaattcaatgtagaatttattttgtccatatctacact

SEQ ID NO: 1124 - DNA, 204 bp, Staphylococcus capitis
  marker
cctttcaacggatgtaaacgttttaaataatgaattttttctaaaatcataaaaaagagctaatagcctttaaatcaagacaattaactcttaataatttattctacaactgatcctatgtgtctaaatttctcgaaacgatcattagctaaatcttcaccagatttttggttcaattcatttagatgtttcacaaaaacttct

SEQ ID NO: 1125 - DNA, 202 bp, Staphylococcus capitis
  marker
ttgaggcgtgaatgtatttccaagcatactattaaatttcaagaaaccttcagctacttcagcttgactagcaccgacggctatttcatcattgctatactcaacaaagcgtcgaatttgagttttatgaaaacttgttacgagcacacgatcttgcgcttgatgtttaacaatagtattgtacatcacctcaggagcaagt

SEQ ID NO: 1126 - DNA, 199 bp, Staphylococcus capitis
  marker
gtggcattcccatattttgaatggattataatcacgtcagtcatttttcaacacctcattcaacgattgattcatttaattcttattttaaaataaaaacactttaaaaagaaatgatattcaaatgatttatctatctcaccgcttcttagatttaaatcatcccattctcattaaagtgttttacaacatctaaatt

SEQ ID NO: 1127 - DNA, 197 bp, Staphylococcus capitis
  marker
gaccacggataccttaccttggcgtatctcatggatgtgattaaatagtcgatgaatgccagacacaccaacgtcatagaagcgtttaacttgaattcccattacttccgcagttaaagcagcttcttcggctactgctaagtccgaagttccagcacaaaggatagaaatataattttgtgattttttaatttttt

SEQ ID NO: 1128 - DNA, 186 bp, Staphylococcus capitis
  marker
tctactttgactgtctttccattaacatcgaatgtaggcataagatgtgggaatataccaaatgttaagatgcctaacacacataatagaaagcttagcacgcctatttttacttttcctgaaaattgattttcaagctcgtcctccggcatttgaactaaacgctcagatgaatcatgtactttc

SEQ ID NO: 1129 - DNA, 170 bp, Staphylococcus capitis
  marker
agcttgtatgttttaatcattttcatataaatgaatgttaaaggttgaagcaaatgatgatgttgaacactcttatatgtaggttcgcacgtttgtttcacctttttattataactaagtaaaaaagcgtcatcattacataataaattaaaacaatttcatataaggga

SEQ ID NO: 1130 - DNA, 166 bp, Staphylococcus capitis
  marker
aatgaacaaaatgaaaggattggataagcttaatatgagcgacaaacaaattgaccatattaaagcgattattcagtctatgactcctaaagaacgttcaaacccagaaacactaaatgtttctcgtaagaaacgtatagctaaaggttctggtcgttcattacaa

SEQ ID NO: 1131 - DNA, 164 bp, Staphylococcus capitis
  marker
tactggtgatgaagctttgttagttaattttaaaatagcaatagcttcagcagcatttttacctctgattaagtcaagaactaatcttactttacgaggtgcgattcttattgttctagcaaccgcttttgcttccattaggatttcctcctctacttattaaa

SEQ ID NO: 1132 - DNA, 163 bp, Staphylococcus capitis
  marker
gagatcaattaaaaccgaagaaagcaattaaatcagtagcactagatcgtggaatgaaaactggagaagtatacaatatatatcatgatgtagaataaaaattattaagttctacatgtatttaattagtgatgaattcacgtgaaagccaccataaaacacc

SEQ ID NO: 1133 - DNA, 162 bp, Staphylococcus capitis
  marker
tggggttaccattatattaattcgcctcctaaaaaatgaacttcccattaagcgtatcattgtatcatcataatttcgacaataaaaaaagcaagctaacatatatatgctagcttgcgtgttgattaactaagccatgagcttgataatcttcacctcagt

SEQ ID NO: 1134 - DNA, 159 bp, Staphylococcus capitis
  marker
gtgttagtcaatttaaaactacaagattcaataagccacttgtaggtatgaaagtgaaggaccatgatgaaattgtcaacgtgatacgattagaatctgatcaattaataacagtacttacacataaaggtatgtcgcttacttactcaactagtgagt

SEQ ID NO: 1135 - DNA, 157 bp, Staphylococcus capitis
  marker
tgttattttaaacgacattaaaaccaaaaagataaagctcgtaatcgtagctaccgatgcgtctgagaatacttttaaagttatgaaagacaagtgcaagagtaatcatattccaataaggtgttttggaacgagagctgatttagggggagcactt

SEQ ID NO: 1136 - DNA, 157 bp, Staphylococcus capitis
  marker
gtaatcagttacttcaggatatgtagaaaggagtattgctatattagtcaatggaccaattgcaatgatagtcataggcttctcgctctttaaaattgtttctttcatagcttcaacagcgtgggtagatgccaaatccttttgcgcaataggggga

SEQ ID NO: 1137 - DNA, 157 bp, Staphylococcus capitis
  marker
actgtaaccaaatctctctctaaacgctcgtgcaatctttaaagatatattcaaattgcaaaaaggctctccacccaaaatactgattccagaaatatacgagggggcacaattttcaagtatttcttgcaagatatcttcagaaaatgtttcacca

SEQ ID NO: 1138 - DNA, 155 bp, Staphylococcus capitis
  marker
cgagtgatgttttcacaccttcacgctgttgatttttatcttgagcattttgatgaatatgaggaataacataatctaatgctcgaataaagaagccaccaagaataaaacctattgcagcaggaagccatggaaccgaacttcctttactcgac

SEQ ID NO: 1139 - DNA, 155 bp, Staphylococcus capitis
  marker
gatcaactcccgttttctgagtatcatcaggctcattagctcctttatgtgagtcagactcttgagctacgttagcctcttgctcctcttgaacacggttgtgggtaggatgattatttaaatgagatgagtcattccttaagccctcatcactc

SEQ ID NO: 1140 - DNA, 151 bp, Staphylococcus capitis
  marker
aataatacctttatttctcctactttactatcaatatctactttttcgacaccaatcatattttctaaacgtgtctttaattggttttcttcctctatagtctcaatattagcaacataaacaattccattttccattgtattctacctca

SEQ ID NO: 1141 - DNA, 148 bp, Staphylococcus capitis
  marker
gacttgaggatattgtctttttaaaacttcagtaatttcaattccattcatttctggcatcactaaatcgagcaacacaatatcaggcagatgatgttgctctatatatgatagaaatgttttgccatcagaaaaacccttgactact

SEQ ID NO: 1142 - DNA, 147 bp, Staphylococcus capitis
  marker
aatggaatatttatttcagagcagactggttaccagaaacctatgcgagaattctttgattacatctttaatgagattggaaacattaatagagaggaaacaattatagttggagattcgttgacctctgatgttatgggtggcctc

SEQ ID NO: 1143 - DNA, 145 bp, Staphylococcus capitis
  marker
ctccggacttgccctatttctcgggttaagttttctatgggtgccttttttctctatagcattcagtttgattacacttgtactcgtacttggcctaacagtgatattgtcacgtggttatcctatacgtgtgctcatcatatta

SEQ ID NO: 1144 - DNA, 144 bp, Staphylococcus capitis
  marker
tctcaagctaaaatatcacgtaatgataaataatttagttagagtaacgacttgacgcatgattgcctctcaagtcgtctttttttaaattacatgatttatattcgttagtatgaatgtaaatatcaacactttagtaactcg

SEQ ID NO: 1145 - DNA, 142 bp, Staphylococcus capitis
  marker
agggtcaaaaggaaaggcaattaatttactagccacttccattgtgtgcggagtggtgttgttaaataagaatcttcctgtatctcccacaatgcccaaatataatacacgtgcagttttttcgcctataatacgctcatcg

SEQ ID NO: 1146 - DNA, 141 bp, Staphylococcus capitis
  marker
gagggtaattgcaaacactctatctaagagctgaagttttcattttctattaatatttatttaccctaacaattttaattatatagagttaaaacacactttccaatagttaaagttactaaacatgattaatattacgca

SEQ ID NO: 1147 - DNA, 137 bp, Staphylococcus capitis
  marker
aacacgtgagttggtttcggtaagcttggatgataaaaaggcataagtctactatggaacagatagaggctaaataatatgtaatattaaataagcgagagacgtattattcaatacgcctctcgcttttatcatag

SEQ ID NO: 1148 - DNA, 136 bp, Staphylococcus capitis
  marker
gatagtaaaaatgagcaagcgaaactcacctactataatataattttaatttaatgaaagatgaattttaaaacgccttggatagatgttgtctcaacatttccaaggcgttttaagttctattgaaatgaacaag

SEQ ID NO: 1149 - DNA, 131 bp, Staphylococcus capitis
  marker
tgcgtctatgtgaaatgaaatgcttttatacaatgagttgaaaatctaactttaggatgcatattaattttatataaagtctctactgtatcgataagtttaaagcaatagtgttttacttattaagtaag

SEQ ID NO: 1150 - DNA, 129 bp, Staphylococcus capitis
  marker
cgtacttatgttctgtatcagttacttaggtatgtaagccataagataatgtattaatgaagtaaatgaatcttaaccaagtctgatagaagatgtgattaactaagaagtgcaatcattcacatatgc

SEQ ID NO: 1151 - DNA, 129 bp, Staphylococcus capitis
  marker
tgaccacatcttcaattttcaaacttgcgttcaataaatcgtatgcagtatgaatatttaaatgcgcaaccatgtttgtatactccttccagttatttaatcttttgttttaatgcattagctagatta

SEQ ID NO: 1152 - DNA, 124 bp, Staphylococcus capitis
  marker
tgaaattactcatgcaagacaagggactcatggatttggttatgatccaatcttctttgtgcctgataaaaagagaacaatggcagaacttactgacgaagagaaaagtgagataagtcacaga

SEQ ID NO: 1153 - DNA, 124 bp, Staphylococcus capitis
  marker
cataaatagtgttagtagaatatttgttatgatatgatagcttacgtgtgatttatcaaagtagtgtaacgtaatctctatgtcgaccatacagagatcaaaatagagttgatttaggaaggaa

SEQ ID NO: 1154 - DNA, 123 bp, Staphylococcus capitis
  marker
cctaaagattcaacaccatacaagcattacaatagtatagctgaagctcaagacgttgctgatgtagtgattgacttttcaaaccctgaattattaataccattactagatgagtcattcaat

SEQ ID NO: 1155 - DNA, 123 bp, Staphylococcus capitis
  marker
gctaggcgcaatcggaattgctcgaacttttcaattcgctggatatttcggcgaaccaatgtggactgaatctaacgtgccattcgaatcactacatactgataatattgaagcatttgatcc

SEQ ID NO: 1156 - DNA, 121 bp, Staphylococcus capitis
  marker
tggaaatgacaagaattatacaactacaatgaaaaacgctaataactctgtcaaatcagtagtaactgttcaaaacaatgtatctaataatactactattcctaaaagtaaatcaggttca

SEQ ID NO: 1157 - DNA, 119 bp, Staphylococcus capitis
  marker
cattgggtctgttgtgctaattctcatattcttatttttagtgtttcatttaattagattagcaagcaaaatcaatagtcaatataataaagtctttattatcgggtatgtttctctta

SEQ ID NO: 1158 - DNA, 118 bp, Staphylococcus capitis
  marker
aaagaccttttaatatcataaacgctatgcatcaaaactagtttattaatggagttaaattatttccggggtaatactcaaacaaaaaagcactatgaacgtcattctagtgttccta

SEQ ID NO: 1159 - DNA, 112 bp, Staphylococcus capitis
  marker
ctcaaccacttttcttaatactgaaaagacttcatctcgattagaaacatcagctttaaaagcaatggcctcttgttcattattcgttaaagatgacgcagcagttttagca

SEQ ID NO: 1160 - DNA, 111 bp, Staphylococcus capitis
  marker
gtagaattttggaataaactattacaaatatcaaaagtcgatgttggttatgcgccttgggtgcttgaagaaagcaaatcggtctttaaccaacgtattcttccgctcttg

SEQ ID NO: 1161 - DNA, 109 bp, Staphylococcus capitis
  marker
ggatgttgaactcatccatgaagttcaaagtcatggtttccaatgctgtcttaatgcgagtaatatcacagaagatatgttgaagcgcatttacaaacaagattatcag

SEQ ID NO: 1162 - DNA, 108 bp, Staphylococcus capitis
  marker
aaagagtcaccattctcaagataaaggagaattgaaccttgcatattctaggctaggtaaacaagtttatgaattagatcatgtaacgaagtcgattaaagacagagt

SEQ ID NO: 1163 - DNA, 106 bp, Staphylococcus capitis
  marker
gccgcttaaatttttcgatcaaacgattgaaactattaaccagctgaaagataaacattcattatatattgttacgaatggtgtgacaatcacgcaacagcgtcgt

SEQ ID NO: 1164 - DNA, 104 bp, Staphylococcus capitis
  marker
agtattgatagtaatcttaccatcttcttttttattatcatcatttccacacgccgttaaaatgagggcaaataaagggagaatgactaataaactcaataatc

SEQ ID NO: 1165 - DNA, 104 bp, Staphylococcus capitis
  marker
aacagttacagtgtttccacccatgcgacctggcattttttgtcctttaaatactcttgaagcgtctgaagccatacctacagaacctggtgctctgtggaaat

SEQ ID NO: 1166 - DNA, 103 bp, Staphylococcus capitis
  marker
tattgcaccaataattgttaaaactatgcaactgatgtaatttgcatttaataaatctttccttgaaactggcagactaccaaagaataagtaagactgagat

SEQ ID NO: 1167 - DNA, 102 bp, Staphylococcus capitis
  marker
tgaaaccagttgtacgctttatagaaacgcattttgaagcgtagtttaatacagaaaataaaggcaagttcttaaatgagtagaacttgcctttaataagtg

SEQ ID NO: 1168 - DNA, 101 bp, Staphylococcus capitis
  marker
ttcagctggcttatttgcatatttattagatttagaaccttttttatatgcttgtttgtcttcaaatccaacttggattgcgttgtaaccgtcaacttctt

SEQ ID NO: 1169 - DNA, 100 bp, Staphylococcus capitis
  marker
attctcatcgccactcgttactgaagattgttcgtagtcattaatatagaatgaagcttttggagcacgattgtataaagttcttgcttcataacgcgcg

SEQ ID NO: 1170 - DNA, 2919 bp, Enterococcus faecalis
  marker
ggcgactccgagtctagctctgctttccctgctaaagatggctttagcaggggagcactcatcatataaaggtgatttttttttgctttgggaaaacgctgttttctcaaagcttttttgtttcttaaaagcattgcagaagcttttccggtttgttatactgattattaattggaattttcagataattaaacatctgagttagtagaagggggaattatatgtcgcaaatgtttgctttttcgttgctgatggttattttatacattggtgatgtagtttctatcaaaacaaaagcttggattccatccgtttttgtttgtggtgttttatttattcttggttattggactatttttccacaaaatattgtggaagtggcagggattcctacagtggttgccactttattaatgtatctgttgattactaatatgggcactctgctctctgttaaagaattggttaatcaatggaaaacgattgtgattgctttgtcaggtattctgggcattattgccttgttgttagctgtggggacttttgtttttgacttaaaaacagttttagttgcaatcccgccgttagtaggaggtttagtttcttcattagtaatgtcagaagcggctcaatcagctggtttagcctcactttcggttttggcaattttaatttatgtcattcaagggtttgctggttatcccttaacttcaattgttctaaaaaaagaaggaaagcggaagcttcaagaatatcgagcagggacatggcagccggttcatgaacaagaggggcaagaaacaggagcagaaccagatgtgcctaaactatttgaaaaagtacccaaacgatatcatacagattattcacgaattttacgtttagccttagttgccacacttgcttattatgtttctgtgtggacggcaccgtttgtgacgattagtccttttgtgctgtgtttatgttttggcgtgattgcaacgtctttaggctttttagaaaagcaaccattgcagaaagcaaatagctttggttttgcgattttagggttaatgctttttgtctttgatggcttaaaacaagccacacctgaaatgttgatggatttatttttaccaatgattgggattattgtgattggtgttatcgggatgtacatcttttcagcaattgttggtcgtgtattaggtgtgagtaaagagatggcattcgctgtttcgttgacagctttatatggctttccagccgattatattattactaatgaagtgattcaatcattgacagaagatgaacaagaacaggcggctttaacgagccatttaatgccaccgatgttagtggcaggtttcgtaacagtcaccattgtttcggttattttagcgggtattttttcaagtattttattaagtttgtagaaacggggcgtaagtatgaaaaaaatcaaagcactagtcaagcagcatgcacaagaaatgattgcttttcgacgggatttacaccaacatccagaattacaatttgaagaatttcgaacgacagaaaaagtcgcggcagttcttgatcaattaggaattacttatcgcaaaacagaaccgacgggtttaattgctgaaattgtgggcggcaaaccaggccgagtggttgcgctgcgggcggatatggatgccttacctgtacaggaattaaatgaagatttagcttataaatctttagaagctggcaagatgcatgcatgtgggcatgattcccataccgcgatgttagtaacagtggctaaagtattaaaagaaatccaggaagaacttcagggaacagtaaggttaatttttcaaccatctgaagaaaatgcgcaaggtgctaaagcaatggttgcgcaaggcgcaatgaccggtgttgatgatgtatttggcttacatatctggtcacaaatgcctgtaggaaccgcttcgtgtcgagtgggctcaagtttcgcatccgcagatattttttctgttgattttaaaggccgtggtggccatggtgccatgccaaacgcttgtattgatgcggcagtcatagcttcttctttcgtgatgaatctgcaaacgattgtttctcgggagacagatcctttagatccagtagttgtcacgattggacggatggatgtggggacccgttttaatgtgattgctgagaatgcacgtttggaaggaacggttcgttgctttagtgtagcaacgcgtaatcgagtagaacaggcgctacaacgctatgcggaacaaacagccgctatttacggtgggacggcttcgttagattatcaatatgggacgttgccagtgattaatgatgagcaggatgccttgtttgcccaaacactaattaaggaaaattttggtgaagcggccttaagacaagaagagccgacaactggtggcgaagacttcagttattatactgaacatgcttctggttgttttgccttagtgggaagtggtaatccagagaaagatacggagtgggcacatcaccatggtcgttttaatattgatgaagatgcgatggcaatgggtgctgagttatatgcccaatatgcgtttgaatatttgaagacacatttttaaaagaaaatcagtaacttcttgttttatgagaacaagaagttatttttatgaaaaatagacctgtcaagacagataagagctcccataatgaccgttcttttggtataataaaaaatagtgtgaagaatcagaacagatgattgaaaaaacgctacttttttggtagtgttagaaagaataaatagattgagggagtatgcgatgcaaccaatcattgaactaaataatatccaatttaattatcaaccagaagatgcttctcccgctttaaaagatgtgtctttttccattcaacaaggcgaatggg

SEQ ID NO: 1171 - DNA, 2711 bp, Enterococcus faecalis
  marker
ggtaagaattaatcaagaataggatcttttttagaaatcatgacccaaacccaactaattagaaaagcaaccgttgctggaacgacccagcccataccaatagtgaacaatggtaagtattggccggctttttctaaaagcgttgttacaaacgccgtatctttgataaaggcaggcgcgctatttaatgcatctaaaacagcagcaatcaatgtgatataggtcgttgcttgatagacttcccgtcgatgtttgaaaataggactgatgattaccaaaagcattaaagtaatcgccaatggataaaggaacatcaagactggaacggcaaattgaatgatgttggttaagccgacatttgcaaaaatagctggtaaaataacaacaattgccaagaatttttgataggaaactttcggaaacatttcttcaaaagtctcagaaaaggctgtgcttaagccgataccggtttttaaacaagcaagaactacgataaaagccagtaaaatactccctggtaggcctaaatagtaattggcaatttgggctaaggcaatcccgccgttttcactgattggaaaagccccgatactcattgttcccatataagcaagtaaggtatagataatccccatcaatacaacactgaaagcacctgatttaatcattcctttagcgatatctcctggtttttcgacgcccatatttcgtaaagtggaaacgacaacaatcccaaaagctaatgaagctaaagcatccagcgtattataaccttctgtaaatcctttaaagaaaggacttgaaatataattttcaccaacagcggcactggccacatgacctaatggttttacaaaggctaaaacaatcaaaattcctagcaatgctaaaaataacggatttaaaaatttacccacataatctaagattttacttggctttctagagaagagccaaacagctaagaaaaataatgcggaaaaaccagcaagaaccagccattgcaagtctttcggaacaaatggtgcaagaccaatctcaaaagaagtagttgctaaccttggtaaagcaaagaaaggaccaatcgttaaatataatagtaaggtaaaaataagagcataacgacgattaatccgagaagctaagtcaaaaacacctgaacttttagaaacacccatagcaatgacaccaagaaaaggtaagccaattccagtggctaagaagcccaagtttgctaaaaagacggaagcccccgcttcttgtcccatatgtacagggaaaattaaatttccagcaccgaaaaacaaaccgaataacattgaaccaacgtatagataatcacgccaaactaactttttttgcatagattcacactccttaatattgtcttattatttaaaataacagaagaagaaacagagagcaaccagtttttatagaaaacattggttttcttatttttctatgaaataagcatactgataatcatcacaatagtgtccatttatataaaattcttctttaaaatgtgcttcctgcacaaaaccatgtttttcatagaatcgaatggcttcttgattggtagccattactcgcaaactcagcttatgaatcccgcttatctcagccatatctttgatatacgacaacaaagaaccaccaatcccttgatcttggaaatctggcgaaacgccaatacttagtagccattgcttttgatgagctgctaacgaagtgggcggatggacttcaataaatccagcaagttgttgtccgctgatggcaacgaaaatcgtttcatccttcattttttcctgatatgccgcaagcgagagtggttgtatctcggcaggggtattcttttttgtccaaatgatttgatccaaggcatgtaatgcgggccaatcggcttcggcaactaagcgaatagtgagtgaggtagacaagataatagggctcctttttctgaaattttaaaatataaaaagactatagcatttattgtctgaaaattcaaatacttttaaaacgaaaagaaaaatggctgcaccttttcgagaaaatcaaaatatgctaccatagctaccagaggatagatggtaaaaaagaatctatctaaatggagggtatgtttgtgaaaaaaatggcagtatattgtggcgccagtctggggaatgagccaatctatcagcaagctgcagtagcgttagccgcttggatgaaagaaaatcactatgatctagtttatggcggtggcaatgttggtctaatgggtacggtggctgacacgcttttagcagaaggtggagaggtaattggtgtcatgcccacttttttaatggaacgagagattgcacataatggcattacaaagatgcatacagtcagtgatatgcatgcgcgtaagaaaaagatgattgaattggcagatgtgtatttagctttacccggtggtcccggcacgctagaagaaattagcgaggtgatctcttggggccgagtcggtgaacatatgaatccttgtattttatacaacgtgaatggttactatgatttactagctgctttttttgataaaatggtagaaactaatttcttaacagaagcggatcgagctaaaattttcatttcagattccttagaagaaattggtgcatttattgattcctatgaaccgccaatgattcgtcaatacaaaaaataacaaaaaa

SEQ ID NO: 1172 - DNA, 2611 bp, Enterococcus faecalis
  marker
gttcaatcagttggacaggcaaggtttgctcctcccaatcttttgcaggctgatggattctttccaataataaagtcgccgtagtttgccccaattgaaaaacaggttgagcaattgttgttagcggcggcgaaacatactcgcacatatcaacattgtcataaccaataatactataatcctcaggaatttttttgcccgcttctgctaatcctcgatataaaccaaaagcaatttcatcattgatagcaaaaattccggtgctctctgtttttaaaatttcggggacagcttggtagccgccagtttttgataattctgtttcgatcaactggaccttttccgtataaacagaacaaaaaccttttaaccgttgctgaatattgactggcgcatgtggcggcattaccacgatgacctgttcatgtcgttgctcttgtaaatgctttgctgctagttgcccacctctataatcgtctgtcaaaacagcatcgctaaagccttctgcttttttttggtcaagtacaataaacggaatctttttcgcacgtagcgtttcattaatcgtttgattggaaatttcagaacttgcaatcacaaagccatcgacactacgacgaatcaactctgttaaatattcatgttctcttgtaacatcttggtccgcattgcataacatcagtataaaattttctttgtataaaacactttcaattcctcgaatcaattgcgcgaaaaatggattagtaatatcaggtacgattacgccaatcgtcttactttttttcatcaccatacgttgcgcaaaatagtcgggctgatagtttaatcgctcttttgcagccaatactttttcgaccgttttcccactaaaccgtgccccattcccgtttaaaatttgtgaaacggtagtaatggagacacctgagtcattggcaacatctttaattgtaacctttttatttgtcatcctacttctctccttgccgtgaacgcgcccattcaccggacctcttaatctcatttaatttactacaatcatttactttacgcaaccacaaataaatacgtacattcgtttaaaccgtcctttcatcccttcaacaaatttcgttgttctacttttaaaatgttatactgtagaaaaaatgatttactttttgctgaatggagggccttaattgaaaaagaaatcgattggtttgttgttagctagcgcatatttgtttcacgcacgttctcgtcaaaaatccttaaaagcctgtctttttgaagattctttacgtctttcccaaattgctcgccttgaacgaaatccgaaagtcaccaaggctttttatcattggcaacgatcattaaatgaacaagtaactttgccaaaacatttacgtcatctttttcctcttcaagaaatgactcaatttcctacgatgtatcgcatgtcaaactccgttattgcgcctaccaagaaagctgtactgtacctgcatggtgggggctttacattgaatctcgcctatagccaattagactttagttataaactaattgaagatctctcttttgcaacagattattttatccctgtatatccattagcaccaaataagtcttttgctgatatttataatcattgctatgctgcttatcaagaaattttacagcattatgatcccgaagatgttattttattaggtgattctgctggtggcacattggttttaaacgtattgcagaatttagccaccgatttccctgaacgcttacccaaagctgctgttttaatttctccttggttagatggacatttagacattcccgttgccaaaagttatcaaaaaaaggacaaaatgattggcatgaactatttacaattaattgcccaagagattgacgacacggccaatcactccacgctttctttaaattgcttgtcctttgattatcaaaaatttccgccactttttttcgtgggcggcacacatgaagttttttgcccttcctatcaccaatttttaaaacaattagggccacgaccacaagatacttgccgattggtgcctggcatgcaacacgttttcgcaatgaaacaatacttgccagaaggacgacaagcgcggaaacaaattgcacaatttatccaagaacaatggtaaaaggcaaatgggacagaagtcaaaacgacttctgtcccacttgccaatttttagaacaaaacacttagttttcttcggcgacttttttctcccgcatagtcaaaacagcgctagccaaaagaacaaccactacaaaagcaatgattcctcctactaaaagactcggacctgcctcacctaatttgcctaaaaataggcctgggattaaataatctgtatccgcaaacgttgaggatgctaactgtagatcacccaagactggtaaaatgaataacggtaaccaactaattaataagccattaaacgcagcccctaaaatcgctccccgacgtccccctgtggaatttccaaaaacacctgccgcggcaccacagaaaaagtgcccgacaacgcctggtataatcacggtggtattcagaccaaccatcgctaacattgaaatagttcccacaata

SEQ ID NO: 1173 - DNA, 2168 bp, Enterococcus faecalis
  marker
gttgctgaccaataactcgtgcttcttcaccgatttttctaataaactcagaagtagaagcattctcttggacaacaaaatttgcctcggcttgttgttgaattcctgcttgcttttccttttcttgactattgtctatctctgaatgtaccaacggctctttggtcttttcagttaatgtagaattttgtggttcctgattatgaggcggcttttcagtgagtgctttacgctcttcagacgctggttgctcactttgtaacgattcggttggtttagtactagcaattggcttttcttgtggcggtaaactattttcagattctaatggttccacattattttctggatggtcactgctgtaattttgtgttgaactttcttgttgttcagacgaacttattattgtttcgttcagcgttgaagaagtaagggttccttggtcttgattggcttggtccgctcttttttcttccagcgatagctgtcgactttcgtccctcgtttcggtctcttcttgagcgattaatggttccgaattgtagtaactggcgcccgcataaatccctaaaattccaatacataccaacttcaaatatcttgcctttctttttttcatcgcatttctccttcatttacctctttatttctgctaataactgctctatctgttggtacgttcctgttgattcattcttgattgtcagcatttgttcacaataagcttggtactctcttgccacttgcttcatgcgtgttaaagttgctaaacgttgttccatctcttcatgaactgttgcaacttgttggttagcttgggcaattgtttcttttgcttgacgtttggcttctaataagacttcgccaatttctttttgagaaagcgtaacggctgtgtctaaattctcttcactggtctgtctctgttgcatcttttcttcagacaattgtttctgtaaagaagtgatagttgcttctttatcacttaacgtttctttaagctgtttaagttgcacatctttttcgactacttgtttttgtaatgcttccacttcattggttcgcattaataattgctccgttagctttttaatggattgctgatataattgattttcttcttctagtttttcaacaaaagaaaatgactcttctgacagttcagtcggcacttgttgctggacctgctttacttttgcagcttgctcttttgcataaacgacctcgtcatcaaagcttgcttcctctgttacctttggttgtgctttcatcgattgttcattttcaaaatccggcatcttctcatactcctcatcttcattgtttttagtcaaaaattgccacatctttttctcccccttcttaccttttacaccgttaacatatagccttttgaacgaattgttttgatatattgtggtttgttcacatcttgttcaatttttttacgcaaatggaaaatcacattagcgacacgatattttcgttcattcgcagtatctttccagacatttttgtagagttcttcatatgtaattgtttgtcctgcgtgtttgtataaatactctattgtgaaaaattccaattttgttaaaagaatttcttctccacttcccaagcaaacactcaaatttggcgcaattaaatacaatctctcagaaagattcttagtaactgtttgttcctcgtttgcaatagctaatttaggataaaaacgtctttttacacgttgcaataaattactcatgcttaacatgcattcttgacgatcataagaatgatcaaaaacgccatctgcacctaattgtaaataaataattcgattgactttactaattacttctgtccgagaaaataaccaaatcggtaaatctgactgcttgcgaatcgtcattaataactcacaacaagtatttacttgctggtggtcagtaacttcaatcactaatccatcaatatggtgcaaatgaagaagtatatttgttccttggatgatctgacattctacttgattactaacaaaccaattttgacagtattcttttgtttcaattgtcaaaggaacgacaccaattgtatatttttccatttttccacctcaatcttcctaatattccccttcaaaatataataatttttatttatattctattaataaataaaaatta

SEQ ID NO: 1174 - DNA, 2090 bp, Enterococcus faecalis
  marker
tagtttaatcctgcaattttcaattcttcaacattcgctgctttagcattttcagtcactacggctttaaatgtcacttggtcgccctcttttaagaatagcgccagcggactgttattagtcgttacgctaaaaatggttttttcatcttctagtaaaaatgaaactaccgtttgcgcttccccagctactactgagacacgagctactttaccttgcatcgttttcaagttggctttgtctgtattttcattgttgcttccttttgttactaactcaattcgataagcgtctaatgcgccttgtgccgtgtctgcatcaatcacaatatcattatctacggcgtttatatagacatattttttgaaaatccctttactgtccattaacgaaacaatccacgttggcacgccatcaatgttataaaggactggcatactagctttccatttcttttctggataaatttttgaagcgatagaaatggcgccatcactatccataatgccgactttagtatcacgataatacgtaacttggcctgttcgggcattgattaaggaataacctaaagcggaatcttggtctttttcactacttgtaaagtccgtaaaataaagcaactggttcccttccttgttcatcatcggcgtaatttgtcctgatgcataaataccattttcagttggaattttgacatcttttttggcaccaaacattgtctggttccaccagccttgactgtaacgaccaaagaattcatttaagctattcgccgctgagctagtaatcggcgcatcaacgaaacttggggctttttgactgtcataaacgttaacttctcctgttgtagcatttaataccgccgttttaaattcattatagtgcatgcgaccagaaaccccatactctttgtaaagcgtttgaatatagtaaggattcccttggtcgtccagctctaaattgattgtgccagttgctgcataacctggataagcggaataaatttttcgtgcggcatctttgccaaagtaagctgaaggagtataaacaattggtttttctacaaattctggctgtgcgttgatatctgtcgcactaatgatgaaatagccaggtacttcccccagttttagccatttaaagaagccattaaattcgactgttgctacataaacatactcgccattgacaacttgtgccgttataccatccaaagtaaacatattggaattgggaatgacagaaaatttctgtaacatttttcgtttcgccgtttgtggtgcaatcgcaatgggtgtttctttcgccgaagttaaaacttcagctttttcttccgtttttaaaggaatcgtttgataaatttcatcaatagaagagattctggtaatactactgacaatagtcaacaaaatcattgccaaaacggcaacacccaaaattttgccagaccagtctttgttagccgttttgttggtattcttccctacttctttgcggcccttttggataccaggaacttcgactttactagctaagcgtgtacttaataacaccccactagcaatcactgcgccaatcagattaatccataacacggttgaaagatttttacttggcaaagtcacaaataaaaagatacctaacaagagcaattcaatcgccattaatagaatggtccccttactctttttccctttattcgctacaattttggcgccattcgcaactaagatcccgataccaaaaaataacgttaacccaataaaattaaaaaacattcacttgccctcctcatagataagtaaaaaaagtgctcccacgcattgtagaagcacttcctgtgatccattctattataacgttttctatttttactgacaatatcgttgaagcaaaatcagtcggaaggcttagagttctgaagaacgtttatttctctggctgaatataaggaacgataggtgcggtcacgccaattgaagccccacgaacaaaaggttcattttgtaaggctttgaaatttttggtttgtccggtgagcatgactccccaaataggtaatttttcgacttttttatttttatttt

SEQ ID NO: 1175 - DNA, 1746 bp, Enterococcus faecalis
  marker
gtatcactttgtcgcacgacagatataatgcgccttttgcacttgttgcattagccacagcaagagcaaaaaggtgtaaaaaaaacaacgacattctaggagtcgattgatttttttatgctctgttctttcttttacggtatttaaggggtgtttcacccgtttcttgtttaaagatccggacaaaatagctatcttcaacaaaccctaaatcttcactgatttgggcaattgttttatctgtctccaaaagaagctgtttagcccatgtgatttttaattgtcgataaaattgactaaagggaataccaaactcctcttttaataaacgacttaaatacgtcggtgtcaaatgaacaaggtctgccagttcttgtaaatttaaacgcagcgatttgttttcccaaagggcatctaaaaccggttgtaattgcttatttttagtttgataggcacttgaaggagttaattgagcagttaataaagtttgttgaatatctttttggatcatattcaatggctccagctcttcttttcgcgaactaatctgtaaggattgtttgtacgtattgattaaataatcttttttgatggcttcagaaataatatattggcttagatcagcgattaatgtcgcgctcttttctaagtctgctagttctaaaacagggtattgttgatacagctcttggtgtgttactaaaaattcttgaatgaaggcatcattcatggttaaaacctgttctaactcttcttggtgatcttcgagcaaaacttcaccagccataatggctcctacatactggtcatcaacaataatggggatggccatatcaacgatgttaaagtgacaacggtagataaaaggctgaccagtgcgaacagcttccaagccaccacgagcatcacatttttcacaaagtttcgagagctcaggggagtgacgtaccagttggcaaaagggttgaacttgactatgtttcgtcacaggtcgccctttataatcgactaaaataatggctaaacgagtgcttaaggccaatgattcttgcaatttttcccacttttctaaatctaaaatattttttaattctacagtcataaggcaatccttcaatctaaagtttaaaaatcataatattttattatttcacaaaataattctatcattttttgcaagaaaacgataccaaaagttcaatgctttttagatgaaagcgttttatactatggatgtaaacaaaatataggaggctatcaacatgagaaaagcattgattttaccaacgaaatatgttcaaggggaagatgaattactaaacttaggttacttcgtttcaacttttggaaaaaaagcgttactaattgcaaatcctgctgacgttgatcgtgtacgtccacaattggaagaaacagcgaaaaagtttgacattaccttcgtagagggtggctttagtggagaagtaacgcgtgaagaaacaaagcgcttgcaaaacgttggacaaaaagaacaagcagactgtatcattggtttaggtggcggtaaagcaatcgatgcttcaaaagtcgtagcagaaggtgaaaacttaattattgtaccaacgattgcggctcaagatgcaccaacttcgcattcagctgtactatatcatgaagatggctcatttgatgattatgcttactttaaacaaagtccaagcgtcgttatggttgatacaaaagtggttgccaaagcgccaactagat

SEQ ID NO: 1176 - DNA, 1688 bp, Enterococcus faecalis
  marker
attatttcttattttgctgattcttaatggtataagtcgaaacgacctttagccatcatttctttggtaccacctgtttcaaagagcgctttgttcatgataatttttttcatgaatgaagctgggtatcctttaatgtctgttttaccaacaattcctaaagcacgtgtatttccgacagaacaaacagaaccttgtgatttaaagctgaaaggtttagttgcttcccctttcaattgtgcttgaatatttttagcagcatgagcgcccatcttcaaggcgatttgtgctgttgttgggtaaggtcgattggtttctgtatccataactgctgagcagtcaccaataatatagacgttgctatggttcgcatctgttaaatctggttgaaccatgacacgaccacgacgagcttcaaatccagaatcgcctacaacgtggcttccactaacacccgttgtccaaataattgttttagcagaaagttctgccaagtcgcctgcttcgttatcttgataaacaactgcgcctggtttgatttctttaatcggtttacctaataataaatgaatagctgaatcttttaataattgcacaccatagttcgcaagtttttcgttaaacatcggcaataggcgagtaactgcttcgacacaataaatttggatttgatctgctgagacacctgcgatttcagcaaattttggtttgttttcaacaagagaacctaataattcaatccctgtaaagcctgctccgcagacaacaatttttaagaattcttcgttttgagttgctttgtattgacgcatttgttcttggatatgttcatacacgtttaaagccgttttcacatctaccatttgtagagcatgttcttgcacaccagggataccaaatgattctgattcaaacccaagagaaacaactaagtaatcataattgattgtttggccatcttctaaagcaactgtttgtgttgcagcatcaattgttttaactgttccttggataaaggtggtcattttttcatcgacaacatccataatattgtatgtgattttttcagctggttgtgttccagcagcaacttcatgcaaatccgttgcttcgtagtgatagttgttacgatccactaaagtaatttcgacgtctttggcgcctttttgtaattcgcgtaatgtttttaagcctgcgtaaccagcacctaaaataacaacatgtttcttattcattttgattcccttccactctataaaaaatttacagccaccacaaacctatggcaaaaaatagcacttgtgcagttgctcccacagctaagatcttcacagcacaaacaaatgttttactcttcacttgttccttcagtaaggcttgggtttgtttccgtacaaaaggtaaagttaaaagcatgagtaacattgttggcggggttaatcctaaaccgacagctaacaaaatggctaacattgctattgtatttaatccgacgaataatttcaaagaacttgctttgccaaggtaatgaactaatgtatatctcttgttattttcatcttcctctaagtcacagatattatttgctaacattaagttagcaatgtaacaagtgttaggtaaggcgactaagaaaatcccccataaattagctgctgaccaattgaaaacttcaaacgtattaatgt

SEQ ID NO: 1177 - DNA, 1656 bp, Enterococcus faecalis
  marker
ggatttagatgatgatgcgaaacggaccattaagaaaagcggtcgttggttcaaagaaatgacagcaaataacggcttttagaaagagaatcgtttctgtgataaaatgaattgatacaatgtgcgaggaggaaagaaaatgacaactaaaagagtcaaaaaaatgggcaaagaagaaatgaaagagatgtttgatcttgttatctatgcttttaatcaggaacccacggcggaacgccaagaacgttttgaaaaattgttgtcacatacgcaaagctatggcttcctaattgatgagcaattaacaagtcaagtgatggcgacaccttttcaagtgaatttccatggtgtccgctatcccatggctggaattggctatgtggcttcttatccagaatatcgtggtgaaggcggcatctctgctattatgaaagaaatgttggctgatttagcgaaacaaaaggttgccctttcttacttagcaccgttttcatatccattttatcgtcaatatggctatgaacaaacatttgaacaagcagagtatacaattaaaacggaagattggccacgtgttaaacgagttccaggtaccattaaacgagtttcttgggctgacggtaaagaggtcattaaagacgtataccttgaaaatcaaagagcgcactctggtggtgtgatccgtgaaacttggtggctggattatacgctgaatcgtgcaagtaaaccaaataatcaagcgatttattattcgtcagaagggaaagcagaaggctatgtgatttatcggatagctgctggcacctttgaaatcgtagaatggaactatttaactaatacagcttttaaagctttagctgggtttattggctcacatagtggttccgttcaatcgttccattggattaatggttttgctggaaaagatttaaatgatttaatgccaacgccagcagcttctgtaaaaattttaccttacatgatggcacgaatcgttgagttacaaacatttctggaaaagtatccatttcaatcaggagaaaaagaaacgtattctttagagattgaagattcctatgggccatggaatgaaggcatttggacaatcacaattgacgaacaaggaaaagcaacagtgactaaaggtgctgcggaaaaagaagggactgctgctttgaaagcagatatccaaacgtggacgcaactattcttgggctatcgttcagcagagacgttatctttttatgaacgcttgcaaggagacgcaacgatagctcaacgtttaggccaacgtttagtcaaaggcatgccaattttagaagattatttttaaaagtgtgtttattcgcaaaaaatgacagaacctactataataaaaatgtaaaaagaattattttagaaaggtgatggggacaatggcgaaaacgaaacaagaaaaagttgcacgcaataataaaattgggcaatatatagctattgcgacaggactttattatttaggaaaaatgattcttgatcggcggcaaaaaaaataatagataaacgaacgacgtgtttcactgaaagaaagtatctcgcataattgtttatgcgggatactttctttttgtctattgacagatgtagtgaagacttctaaaattaaaacagattgtt

SEQ ID NO: 1178 - DNA, 1635 bp, Enterococcus faecalis
  marker
gcaagacacgatataactgcgcttctgtgactcctttttttaaggaaatgtaaggttttaacgcatctaaaatatctttaacatctggcatggaaatacctggcaatagccaatctgattgaacttggtgcatcaattgatttttctccaaagagctcataatgggcttggtaagataaacctttttggctgtttcaatagggaccgttgagaaaatgatgtcatagcttttttcagatacattctctatttccctcaccgcattcgtttctttaaattcaatcattggaaatagccgacgcaattccgattgcaaaatcaacgaagaactgataccactgggacaaacaattagcgcttttagcttttcttgccgctgctcatttttttggccgaaaatttctccaccaaataatatggtaaaaaaaccgatttcctctgacgggattgaccgtttcgttaatttttctaaaggagctaacgcttgttcacaaagatgataaagcgaccgatacgattgtcgaatatccttgattaaaacattcggcaagtaaaagccatagttaatccgaaaataggcaggaaccagatgataatacacattcatgagcaattcacgaggctgctcaaattgaacgacggccaataattccattttccgaataatttcaccagaaatatctaataaaaactctaacttcgtatctcgcaattctccttgcaaggctgtcattaaacaaatcgtgaaaaaaagactctcagtttctacattcgccactggcccaactaaatcacttaaaatacgacgactgacgggataagcgcgtaaggactgaattaactggttctcaggccagacgactgttttatatttgcctaatcttttttgagaaaaagcaagaaagtaactaatttcatccaatctgctgggtaccagttgaagctgtgcttcctggacggctaattgaatgccgtcacgcatttttgcgtattggctcatttgatgctgactgagccagcaaaataaagcgaaggtgcccgacttttgttgtaagaggcgggcaagccaatttttcccgaaacgacgaatccgaaattcatctccttctaggtaaaaccctcgttttcgttcgtaggataaagcaatgttttcagttgctagttggtgtcgtacttttttgatgtccgctaaaatagtgcctttcgaaacgtctaaaaaattttgataatgatacaccgatagttcttcgatttctgaataagtgagcaaaaaaataagtgcttgtctttctgtttcgctatagatcacttgacgttgttgaaaaagttgttttccccattcatttgcggaaaggtttggaatgctgacggtattctgttgaacttctccgcctattgtcgaaagttgtgtcactaattctcgttgcgaaagatcggttatttgttgagccaaagagagcgcaattttttgccctgcatactcgtcaaggagataacttattttataattcacagctgtgtcctcctcctgtaatcatcatataatgatagcgctttattttctatctaagttgggtacaaatgtctactgtacttttttgataaattgtaccgttctttattttaaagttaaca

SEQ ID NO: 1179 - DNA, 1507 bp, Enterococcus faecalis
  marker
aatgcctaatgtaaagacagtaatcaaggttgctaaaattgaagtcccgatatacgtggctaaaccaccgtcaaaatatgaatttttcattcttttcctccttatctcataaactttattataacaagaataaatggcctgggaaacaaaatgaggatgaaataagtatttttattcattattgatgtgaaatatgttatttatgcaactcaaacttggcagcattagatattttgtaacaaatgttatctaatgtaactaccataataaaacgttttccttaggaagtgaattagaaatttaaaaaaaaggctacttaaatgagcattaatattgtacgagacatatctttttgctattgtcaacttctgaaaaagaccactaagtggaaaaaataagagaaaagaagggtgaataattttttatgacaaaaagtgtaaaatttttagtgttactgttggtaatgattctaccaattgcgggggcgttattgattggtccaatttcgtttggcgccgaattgagcaaaagttcaatcgttgacaaagtagaattagatcacactactttatatcaaggagagatgacctcaattaaagtatcttttagtgacaaagaaaatcagaaaataaaacctggagatactattactttaactttaccaaatgcattagttggaatgaccgagaacgatggctcaccacgaaaaatcaatttaaatggtttaggggaagtttttatctataaagatcatgttgtagcaacatttaacgaaaaagttgaatctttacataatgtgaatgggcatttttctttcgggattaaaacgcttatcaccaatagttcgcaaccgaatgtgatagaaacggatttcggaacagcaacggcgactcaacgtttgacgattgaaggagtgactaacacagagactggccaaattgagcgagactatccgtttttttataaagtaggcgatttggctggagagtcaaatcaagtacgttggtttttaaatgtgaacctcaataaatccgatgtcacagaagatatttcaattgcggatcgacaaggaagtggtcaacaattaaataaagagagttttacatttgatattgtgaatgacaaagaaactaaatatatttcacttgccgagtttgagcaacaaggttatggcaaaattgacttcgtaacagataatgactttaatttacgtttttatcgggataaagcacgctttacttcctttatcgtccgttacacttcgacaatcacagaagcaggccaacatcaagcaacatttgaaaatagttatgacatcaattatcaactaaacaatcaagacgcaacgaatgaaaaaaatacatcacaggttaaaaatgtttttgtagaaggcgaggcaagcggcaatcaaaatgtggaaatgccaacagaagaaagtctagacattcctttagagacaatagatgaatgggaaccaaagacacctacttcggaacaggcaacagaa

SEQ ID NO: 1180 - DNA, 1500 bp, Enterococcus faecalis
  marker
tttctcgttccttttaacaaaagtaattgggacaagcgtcgcacatcttcaggagctaaatcaatttttttaatcgtatgatacagcgtttctaattgtttcactgtctctggattaggtactccgtcaagtactcgtacttgaaaatcatctaaaatattttcaccattttcaatatacgcatctaaaaaagaagtatccaatgactgttgcaataactggattgcttgttccattggctcgaaagcctcttcaattttttctgggaacaaattagcacctctattctattcaaaatgtaacaacttccatacctgttttattttaacgaaaaaagaaagaataatcaatgcctttactgtctttcttctaaaatctaataatttgtagaaaaacaacgctattccagtattgtttccgcttttttttgatgagaaactctctcttgatattggtattttcgaccagatttgtttaataaaacagttattcttaattgttcatttttgtatgtataatcgagggtcacttgcgcgtatacgagcctttcttctgtttttaactttcgtctattttgtttaacatctgcaagaaataaatgaaggatacttttccctgcatagtattcctgggtagcttgcgtaaatttttgtgttaactgacgttcttctagtaactgaagggcgagaaaactcatcaaataaacaaaggccatggccgtgaacaataagtttcctgaatatttttgcctcattaaaattctccctttatcggaaaaaaactatcaaatgtttttccagaagtaaaagtaacttccaaagtaaacgattgtccttcatttttaaactgtccatttttgataccaattaacagcggttgatagcctttaccattgactcgcttaataattttatcttctttgatttgaattgaaatagtcttgtttgtttctgagtcgaggaaagaaatctcttgagcagagcctgtttggaaaacgagcttttgacattctttttctaattgaattaaaaaaatatgccaggatttcgaatcattgtttttcaaatattgatttccgataaaactttgttgaatcatcaactgaaacaattgacacatacaacttaaaacgactagtgctactaaacactctaacatcgtaaaacccgcatattttttattgaccaatcaaaatcgctcctcttgaatctgtgacttttagtatccttcttccctcgttctccatcaaagaaaatcggtaagtttctccttgatatatccgctctttgaaacgtaaatcacccgtctgctctaaaaataaaattgcttcgtatcctagacgagtgcgcgttaattcttgctcccgttgataattttgctgaattaattgtgtaatagtcagggagaatatccctgctatcacacatacaatactaaaactaacgagactctctaataaaataaaaccgctataaatagttaattttcttcgtatatttg

SEQ ID NO: 1181 - DNA, 1439 bp, Enterococcus faecalis
  marker
aattatgtttattccatttgtaattgcgccattagttgctactacaattggctgggttgcaacgtatcttgggctagtcgccccagtttctcaacaagtcgcatgggtgacaccgccgttgctattatctttcttagcgacaggtgccgactggcgcgcaccaatcgtagcgttggtatgtatggtagtcactttcttgatttggacaccgtttgttatcgctgctaacaaaatggatcctgcattaggcgaaagagagcaataagcaataaaaacagcaattacttgtatagaaaggagcgagcggcatgatttcgattgcaagtgcaatgaagcaagaggaaattattactttattagaggcatatcaaggggaaaatgaaacatttacttttaaagaaaaaaatggtattaagttattttttgaagttgaaggagaccctgaaactgctgcacaagttgcaaaacagctgattaaggaacaaccttggggtggcgttttatacttccaagcaacggtagtctaaaaagataggatggatgaaaatgattagaaatggattatttttatgtagtattggcttcttgattgttttgtattcgttgaatcccagctccttaaactatgatttattaagtctgacaacggggatttttctcattggacttggtggttacctgttttttaaaggaaaaaaagttgctgaagaagaggcgacaaaggatgaggtgaaacggtaatggaaattacgaaaacattaactatttcagcagatgaattttacacgcaattaatgaattctgttatttttgatatccgtaagcaaacaggcaaaactcttacaagaaagcagttacgtaagtttgaatatatcaaagaatatagtaaaaatagtcgcgcgaaaatagttattgaagaagctgtagaaaataagacctatcaatttcgaacatccacaactaaaaatgatttctcggtgcggtatgagctacagccaattgatgaaaaaagctgtgaactgcgttatacagaaacaatggtttcttatggggcgttacaaaaactgaatgatgcagtattaggtatctttttaagttattttaaaaagaaacagttttataaaatgcttaaaatgatggaaactgcttaaagggaaaaagcggcttttgtccagttgattctcttcagctttagaaagtgagcgatgagtcgtttcgggttatcgctcactttcttttgttgccctattattttggaaacgcacacaaaaaagctgtgtgtaatcgttttatttttagtgtgtacacgctttctatatcaagaaacgttgtcatatcaaggtttttaatgtgttaaaacttggcacgcttcttgcttatataaaggtgtaaagcaaaacaaagagaatttaggagatgaaggaaaatggcaaaaaaaa

SEQ ID NO: 1182 - DNA, 1203 bp, Enterococcus faecalis
  marker
agcagcatctagtgcattattatttgaagaactagtcaaagtaatcaatcaataacagtgagaaaaaagtttagcaagtgcctctcttgaagcgcttgctaagcttttttataaataatggtttcttttgttcatctatgggataatttaagtaacaaaaaataacaaagatagacaaatgggggatttaaaaatgaaaaagcatgtgattgtgggatgtttattaatcgttagctcaatgtttgtaagtgcttgtggaaattcatcagacgtgaccacagaaaaaaccagtgtcacaaaacaagtcgaagctacgggacaaagcacatcctcttccgtagaccaaaccaagtatgatgccattattacagaagctaaaaagttaacggcagaggggcaatataaagaatcagaagaaaaattagctacgatccctgttagcgatttagggaaacctcattattcgatcgttaaagaaacggttgagaaactaaataatcaaaatagtgaaggcttaaaaagacaagaagaagtcgcggttgaaaagcaaacgaagtcgagtccggcaccaacgggatcacttaaaccaattccagatgaatttgctaaatgggcaaccacgtatcttttttattatccacgaggagatcaaaagcaagcgggtttaatcattgaagcgaatggagcggtcacgcagacgaatacgaatggcgaaatttacacaggaaaagccgaaataagtggagcttcgggcactattttaagttatgatacgactagttatcgcccgacgacccaaccagctacaaaatcgattactccaaatgttaaaatcactgttacttggaacaatggcggcggtgttgatgtttattatggctacgtttcttattcacaacgtttagctttgacagatggtatcgccgtgacagacggggtcaaagaagtttggctttcataaaaagagctagacattcaagtttttgcttgaatgtctagctcttttgttgattgaatcgggggatttaaatacttagtttcgataagaacgaacggtattattaatagcagaaatactatattttaattcatcttctaacgtttgatcaatgtctgtgtctaaagtttctgcaaacatggcttcatattcagcgatagaaagttctgtccgattatccagcagtgctaaatgagtttcttttt

SEQ ID NO: 1183 - DNA, 1109 bp, Enterococcus faecalis
  marker
acgtattcacaaactggactgtttcttggtaacattgtttagcttcttttgtttgatagtcgaattgatattcgtgggtgatcgttgctttcttatctttgaaaaagagagctgaaactggaacatttaaagtttttaaccgctgaaccaaggctagtccttgctcttggaatgaaaagctattgccatctgttagatacgtcgggggaaattctttggtgactttatccactaaactcacttcttgcagttctgcactcgtctgccagtctttagtgccgagcaaggaccaagccactgttttaacgaaaaatttcataaaacgattatcactttgttggttggccatttgtttcaaatccaccggaccacaatacgagagcgtgccttttaaatggctagccggcaatgctgcagtcatccctagttctttggcatagttggcattggtttgaactgttgcatattgtagagcaatctgtgcacccgcactgtccccgccaataaaaagcttagataaatctaacatgggatacgcttgtttcttttctaataaaaattgaacaagttcattgacctgctggagctggcttggataaggtgcgtctggtgctaattcataattcattgaaataaaggcaactgaggaatcagccactaaacgtgtcgcaaactctttcatcccagacttatctcctcccacatagccaccaccatggacccataaaacgactggtaccgcttgttttgacgtttggggataatacaaatcaaaggtattcttttttcttgaagaagggtatgtttgattttcttgcaattggacattgggcaatgctttatcataggaagctgaatcttttatttcaacttcgcctgcgaataactggttgatgacccaagcgcctggcttaggggataattgaaaggcgagaaacacgcctaagcaaataaccacaatgattcctaacaaccaaaggataaaacgtacgatttttcttttcactctattcacctgctttaatttgtagcaaaattatagcatgttttttagccaaagcgtttattttgaaacagcttttttagaatttgatgtacttttatcattt

SEQ ID NO: 1184 - DNA, 1070 bp, Enterococcus faecalis
  marker
tgatggcgatggaaagattgcggaaaaagaaaagcactaggtagtccgtgaatagctaatgaaagatttagttgataagatctttcattggctattttttgactaagggaaagggtctcattcttttatttacccaaaaagctcaaacggaattgctaaatcgccatgaaaattcgttgttgcttttcttaggtattttcattagaatgagtgaagtgtataaaaagaaggagcgacttatgaaaaattatccagtaaagaaaaatgacgtcattgaagtagaaatcattgacttgacgcatgaaggtttaggcgtggcaaaagtggaccattatccattatttattgaaaatgccttaccaggtgaaaaacttgaaatcaaagtcttaaaaacaggcaaaagttttggttatgggaaagtattgactgtcctaaaaagcagtgaacagcgtgtgcccgtgaaagatgaaaactttacaaaagtcgggattagtccgttgcaacatttagcgtacggcgcccaactatcatttaaaacacaacaagtagaaaatgttatgcaacgtgtcgctaaattgcaagaagtccctgttttaccaacaattgggatgaacgatccgtggcattaccggaacaaagcacaaattcccgtgcgtaaaattgacaaccaactacaaacaggttttttccggaaaaatagccatgatttaattccgatggaacatttctatattcaagacccagaaattgatgcagcaattgttaaaatccgtgacattatgcgtaaatatagcgtaaaaccttataacgaatctgataatacagggaacttacgccatattgtcgttcgtcgtggctaccatactggggagatgatggttgttctaattacgagaacaccgaaattattcccaattagtaaaattgtgccagatattttggaagctattccggaagtagtcagcattgtacaaaatgtaaatccaaaacgaaccaatgtcatttttggcgacgaaaccatcttattacatgggtctgaaaaaattacagatactatttttgatttgaaa

SEQ ID NO: 1185 - DNA, 1052 bp, Enterococcus faecalis
  marker
gtcaaaggcctgaataatacgctcatcttcttgttgcgcacctttattcgggcggaaaaacgaacttctccctagatgttccagccctcttcgcacttctggttgaaaaataacaaccgcggcgattacaccatacatgatgacttgattcattaaccaagataatgtatgtagaccaattatctcacttagaatgcggataatgataaaaacagcgacaccttttaatagttggactgcttttgttccacgaacaagcatgattaatttgtaaacgaggtaccatacgactaggatatctatgatattgataacaaaatccttagataagaaatccgttgagatgacttgctgccaataattcaaatctaataattgattcaattgaaacgacatcatacccctcacttctctctcaagatttcctaacaagtataccacattattttctttcatcacagaacgcaagcggaaacatcaaaaaaatttaggaactttttcaaataacttgaaatttttcatcaaaaaatcgcatttctaactaaaaaacgtgtctaagcaaaaagctcagacacgtttttttgacttctatttaatcttgctcacgttgttttctcttggctgctcgttctgcgcggcgggcagcccttcttgcttccgcttccggatcaactacgcgttcttttttcactcgtggcttctcgttctctggcgtatttatttctggttcactttgtttttcaagttttgctcgaattttttcttcttgaccagctaaacgagcataattatagaaccgtctcttagcatcattaattgttttattaaataacaattccgctgtatctggttgactggattctaaggacgcaaagcgaacttgttggcgcataaactctttcattaatgaaaaatctggttttttgaaatccaatatcattggttctttgcctttttctcgcaataatggattatagcgatataaagaccagtaacctgaatgaaccgcgtctttcgcttctttcaacgtttgactcatcccacctgctaaa

SEQ ID NO: 1186 - DNA, 1038 bp, Enterococcus faecalis
  marker
aaagtaaccgtttttcttatttgtgggaaaaacccacaaattaaaatactgtccttgttatattatagctaaagcataaataaccgtcaaccactctactgataaaatacgaaatttttgtttgatttttcgtcttattcgctatttttcgcaacaatcggcacaacgaccaaggatttcaaagcgatgtccttcaattgaacaaccttttaactgttcttcaaaaaaattcatcggacacatgtgaatttcttccgttttgccacaaaccgtacaaataaagtgatgatgatgttccacctcttggcaacaacggaagcgaaacttttgctcgccatttaattctgttttttccagtaattctaagcgctcaaagtcatgcaagttacgataaaccgtatcataactgactcctttaaaggtttcattcataaattcatacacttcacgtgcagaaacataccgatttcgcttaatcaaatagctcatcagtaattctcgttttttagtatattttaatccactggctttcatggtttctaaggcttgttcaatattggtttttactggtgccatcgccatttcctccctcaccaatctaaatcagaatcattacgaaatagattctggacttatggtataataaaattattaaaaatgcaagaaaggacttaccctctatgactatttctgaagaaaaaaaatgtgtgacgatttttgtcatctcagattctgctggcgagaccgcttcaaaattggcggctgcttcaatggcccagtaccccactgttgattttactttgattagacgaacattcgttaaagacgaagataaactggtgcaagcgttagaagatgccaaaaaagcagaggccatggtactgcatactatcattaatgatcatctcgtggcgattgctaatcaatttttcaatgagcatcaattgttccattttgacattttgacaccaccagttgcggaaatcgaacgattaacaggtgtcgcgcccatgcgggaaccaggtgccttacatcatc

SEQ ID NO: 1187 - DNA, 1027 bp, Enterococcus faecalis
  marker
gatggtttattgggtcaagggcgatatctataaaaacgaaccattagcctttcttttagaagacagccaaattaaagaaagcattgagccctattatatggcgcgaattgttgatgtcaaagcctttttagaaaactttccttttgaaagtacagctaagcccttccattttgtcgttaaagatcctgtcgctgagtggaataatggtatttttggcttaatttgggatgaaaatgatcaagtgaccattacggatgaacctctaggcaccgccgttcacttagatattcaaacactaacttgtttagtcatgaattaccgacgcccttcgtacttacatcgaattgagcgtattgatacagataaagaaactttaaattctttggaacggatttttcctgaccaagaagcttatttcagtgattatttctaaacccttggattggagacagacaaatgacaaaaatttattttgcaggacctttattttcgcaagctgacttacgttataatgcctatttagtcgaacaaattcgacaattggataaaacaatcgatctttatttaccacaagaaaatgcggcgattaacgacaaatctgcttatgccgatagcaaaatgattgccttagcagatacagaaaacgtccttgctagcgacttattggttgctttattagacggaccaaccattgatgcgggcgtagcttcagaaattggtgttgcttatgccaaaggaatcccggtggttgccctttacacagacagccgccaacaaggtgctgataatcaccaaaagcttgatgctttgaacgaagtcgctgaaaatcaattccattatttaaacctttatacagttggtttgattaaattgaatggtcgggttgtttcttcagaagaggatttgttggaagaaattaagcaacgattgtcataataaaaaaaaagaacgagcgaattcgctcgttcatttttttacacttcttctatcggttcattttcaaaaactaattgattgtctaatagac

SEQ ID NO: 1188 - DNA, 931 bp, Enterococcus faecalis
  marker
cgtctaataatataatgactccatcaaccaataagttaaatcagcattagtcctttagcttaggaagtgctatcgtttgtccttcggttaatacagaatacgttaagtcatttgtctgcttgagggcggttaaggaatagcccgtttttttagcaatttttgcgagtgtctctcctctttttacttcataatactcagtagactctgtttttgagtcattcgctttaccatttgattgctctgctgtcttcaaagcattagtcaccgatttactgattattagtgattgaagtaacgcttgttctttcggttctagagaagtcgccgctgtatgctgaggaatcgtgattttttggccaatataaaacatttcttgagtctttgaattttgttttaaaatggctgttgctgacacaccaaacgtctggctaatggtggcgagagaatctcctttgcttacttcatagatgactgcttctttttttagctgttctttgactgcttccttatcaaacgaaggtttcttttcttctgccaaattagtcactactggtttcttcttttcttgatcgtattcagttaattgataggtttcaatcaacgcgtttaattttttatcgtaatatgtatccgttgcataacgacctgttaaaaattttgttgcctgctgataattcgtcgtgtttgctttcaaaacgccgtgataaaacgttggattaccagccagcccattgatgattaatttactatagtctgttaatgactctttataggatggatactgacgaaaatcggcatgaatggtggtcatcttccctttaccatcatcttcttgtgtgggaaagctgacactttgaccttgataagcgcctttaatgccaaacaaattataattaggcggcgctgctaacgcactattgcccgagccact

SEQ ID NO: 1189 - DNA, 897 bp, Enterococcus faecalis
  marker
accgatgatctgaaaatgaaacatggatttgaagatttccaaatgcgtatggtaggtaaagccactggttcaccagcaatgtttaaagcagccatgaaagtcgatcatgctgcagcgggcattttaagtaaacaaaaagacattactgttgaaaacatgtacaatcatggaggctaccttgataaaggaccagggttagtaaaaggttggaccgatgttcgtgatttgccaagaccaccaaaatcttcagaaaacttcagaagttggttcaaaaaaacatcaagaaggtgaaaaaaatgactaacgaagcgattcaaaatcgagaaccttttttacaaaatctacgagaaaaattagacgtagaaaaacagcctgtttcggcccatccatttgagccagttaatcatttaccagaagaacagttggcagataaaacaccagcagagctattaacgattgtgaaagaacgtgtggaaacgattcacacgaacttagtggaaaccacacaagaaaatttactgacgacgattcagcaaattgttgctgagtttggtggggacaatcttttattgccaacagatgcacgttttgaagcctatggattagctgatttagctaagtcattagaggctgtttctgttaagcaatggcaacctggaagtgagcaacgagaagcgaatattcaaacagctgctcaggcaaatattgcgattgcctttgctgagtttttactagctgaatcaggaacgattgtggtggagtccaatgcgggacaaggcagagccttacattttttaccgaagcattacatttcaattataccgtttagcaaactcgttccacgttcgactcagccagcagctttttatacagaaaaaatagaaaaaggcgaaaaaa

SEQ ID NO: 1190 - DNA, 886 bp, Enterococcus faecalis
  marker
atgacagtcttacctggtgcgcacagttatttacatggtgaaaaagtagcttttgcaacgattgcacaacttgtattagaagatgcagcaaaagacgaattagaagctgttttagactttagcgcttctgtaggtttaccattaacgctttcagacattggtgtcgatgaaatcacttatgaagaagcgttggaagtagccaaaattgcttgcattccagaagaatcaattcattcaatgccattcccaattgtcgttgaagaagtagcgaatgcaatcattgttgcagataaagtcggacaagaatataaaacaagacataaattagattaaggaagtgtccacatgaaagcagatattttactcgtttcacatagcaaaatgattacagatggtattaaagagatgattgaacagatgaacgccagtgaagaaattacaattcattcacttggtggtacatcagatggttcattaggttcagatccaatgaaaatcattgacacgattaacgaagcggactctgaccgagaatttttaatttttgccgatttaggcagtgccgttttaagttcagaattagcttttgatatgctagaagaagaccaacagaaacattatcatttagtcgatgcaccattggttgaaggtgcctttgcgtcagcaattactgcaggtgtctcagatgatttgacgcaaattttagcagaagctcaaaatgctggtaagaaagggtggaactaaatgaaaaaaattattaatgaacctggtaaaattgtcgaagaaatgctccaaggaattgtgaaaagctatggaaaccttgttcatcaagtcgaagattctcgcgtgattgctcgcaacgactcaaacaaacaagttgggttag

SEQ ID NO: 1191 - DNA, 855 bp, Enterococcus faecalis
  marker
gactgcttgcttattcaatagataatattgattgctttgattgatcgcttcttcgaaatccatcccacgattaccaaattcaacggggcgtttcttttttacttgtttttttggtgattgtgcttcatgatgattataaggtattccgttaggataatggaacgtcacgtttatcacactcctagcctgtattataccaaaaaaaagacctgaaagaaaagggatgacttatggaaatgataaaaaccctctatgtcaccggttatcgcagctttgaattggggatatttcaaggaaaagacccgaaaatcacagttattaaaaatgtcttaaaaaaagagttagccagttatattgaaacgggagtagaatggattttgatttctggcaatttaggtgttgaactttggacagctgaagtagttggggaattaaaaacggaatatccagaagttcagctaggtttactttatccgtttaaagactttggcaataattggaatgaacaaaatcgagaactgttaacgaaagcggaaagtttggctgattatatcaactcagtaagtcaccagccctatcaatcgccagcacaattaaaaatgcatacaaaatttcttttggaacattctgggggcagcttacttatttatgacaaagagtaccctggcaaaacggagtattttttaaaggatgcacaacatttttcggaacgagaaccctatgatattcgcttaattacaatggatgatttacaaaactcggtgattgattagagaatctgtttgattttctagctatttttcgttacaatagtatttgtggaactatgaaattttctatcgtaaataaacaaat

SEQ ID NO: 1192 - DNA, 827 bp, Enterococcus faecalis
  marker
cgacaaatacaattaacacctgaaggagaatatttagctaaacaagggcaagatattttaagcttagcgaataaaacagtcaccaacttgtcgcaaaatgaattcattaatggcgaaatcacgattggtggcggcgaaacaaaagctatgtcttttttagcgaatgcactacaacaaataacaagccagcactcagctgatattcaccttcatttatacagtgggaatgcagatgatgtaatagaacggctagacaaaggattattagattttggtttaattattgagcctgcacctaaacaaaaatatagctatttaacattaccagttgtagatacatggggcttaattactgtaaaggaccatcccttagccactaaaaatgttattactgcagccgatttaaaagaagaacctttatttatttctcgacaagcacaagttccgagccaactctctgattggctcgaagcaagtctagatcagttccgaatcgttgggacctacaacttactttacaacgcttcactgatggtagaagctgggctaggtagcgccctaagcattgatggtattctagaaacaaagcaaacaaatttacgttttatcccgctatatcctgctttaacagccaaaattagtttaatttggcgcaaaaatacggttctttccacagctgctgcattatttttagaacaaataaaaaaaagtattcaacgccctgaataataggtcgttgaatacttttttaaatcatcactgtgatcgtagctgctgccaaaatcaaaactaagccgataatcgttacggtcatttccttggctgtt

SEQ ID NO: 1193 - DNA, 781 bp, Enterococcus faecalis
  marker
tgatttcattatatttcctccttatcttcctgaatccaacgaataattttagctggtgttcctgcaacaatagcgttagctggcacatctttagttacagtcgcattagctgctacgatagcattttcaccaatcgtaatacctggtaaaacagtgacacccgcgcctaaccacgcaaattttttaatggtaattggtgctagcaatacgcctcgccgtttcattggcagttccggatgattgacacttaagagattaacgcgcggaccaattaaaacattgtcttcaattataatgccccctaaatcaacaaacatagctgcccgattaataaaaatatttttaccaaaatgtatattgcgtccaaaatctgtataaaaaggcaataaaatcgtaacggtttcgtcaattttgtcttggataatcgtggcaagaagattccttacttcattatgtgtataggcttgttgatttaattctattaaatagcgactattttcctcttgaatctgatgaataagttgaaatagtggttcatctttatcaatgctacctgttgcaattagttcttggagattttttgtaagcattcctaatcgcctccttttgctaaatttatcgtaatacgtgacaactcctctgtctaatacttataataaatagataagtatgcgttttagttataggagggaaagtaatggaattacgagtgattcactatttcttagcagtggtccaagaaaaaacgattagtggcgcagccaaacaattgcatgtatca

SEQ ID NO: 1194 - DNA, 780 bp, Enterococcus faecalis
  marker
aatcaaaggatttgttggtgcagctttggcaaataaagaaagtaaataagcaaaaatggacgaagtgattcagttcacttcgtccatttttaatctaaaaaagtacggggctcatcatgagccccgtactttttatgctgctttattttcatctggtttagaactactttcaggtggttgcggcggttcttgtgaactagaacttgaaggttcaggtggttgttctgatgttgccggttgctctgctgaggaagagcttgccggttgttcggttgatggtggcgcttcagaggaagaaggcgcactttctgaactagaacttgatgaactttccgcttcttttgtggaagaggattccaccgtactgctagattccggctgtggtgctgaagaggtagtacttggtaaaacttgtacatttggtacctcataggcatctttcacgtataattcattacctacccgcacaacactgtctggctgcacccagtcatcgtttgaaacattttgagacaagtaactcattatttcacgataaacatccgaggcaattccatagtattcttgatagattggtgtatttcgatcattgtatccagtccaaacagaaacggcatagtgtgttgtataaccaacaaaggtactatccggggcaattcctttttctgttgtgcccattcgcgctaaatcttcatcagtatagttagaagtccctgttttggccgcttggattaagcctggaatggcgccgttaaatcctgttccgccgtttaaaacatc

SEQ ID NO: 1195 - DNA, 747 bp, Enterococcus faecalis
  marker
ggtacattacctgcgacaatggctggatcagtcgccgtaatgattaacgcaattattcgagatcttccccaagagtttgtctcaacttatgcggcaagtttggaagcagacaaaggtatttttgcagtattgaatgtcatcattgggattaatggttttgtttggaatggtacattggctatcgctggtttgattttcgctttttcttggggctataacttagcgaaagcatacaatgtgaatgagctagctggtgggattgtcagtttagctaccttaatttcaggtgttgcttttgcaccaaataacacagctgaattagctgtaaaagtgccagaaaagattgccaacgcaattaatggggcagaaattggtgcgtcaattgctaataatcaattgactgtcaatccatggggttggttaaatctcaaccatctaaatggtaacgctttctttacggtgatgattatgggcgctttatcaaccattattttttgtaaattaatgcaagcggatttaacaataaaaatgcctgattctgtaccaccagcagtttcaaaagcgtttgcggcaattttaccagcaacaatcgcattgtatgtcgtagcaattattaactttacggtgtcaaaactttcaggcggtcaattattaattgacttaattcaaaaatatatcgcggaaccgttccttgggttatcacaaggactaggcgctgtgttaatcgtaacggtttttgttcaaatt

SEQ ID NO: 1196 - DNA, 733 bp, Enterococcus faecalis
  marker
ttacatgtttttattaaaaaaagagccggacgtatcaaaacgtcaggctctttttaaggttgttttgttttacctttttgattcatatgttctttacatgtgattgttataaccgaaagcaaggcgatgaagagaaaaaagtaaccgagcggcgtacagaaaaaggcgggttcttttaaaagtccatcgctagataatgttgatccaactaaaatagagatcataaataataaaagactaatcaagccaagaaataagctaatacgatattttttcaacttcagttcctcctttaatgaactatcactaagataaatcaaaaaggttaacttttttttaggcaactgttaaaacttagataagaaatctattttctaagtttgtcgttgttggtaattggttaagatcatacgtgaaaagggaccgacaatcagcaattgataaggaagggcaacaataaagttcaggccccaagcttggaaatacgcacttagtgacaacgtctggccttccattaataagccaaataaagacatacaagtcaccatgccgataatcatgagactcgaaatggtcagaataagtaatagccgtttttctttattaaagggtaaagaaaaagcgattttcttagctaagacaccaacgatgaaaacgtctaaaataaaagcaacgataaatccaggaagcaaaccttttgataaggcgtacaatgaaaattctccatgcaata

SEQ ID NO: 1197 - DNA, 685 bp, Enterococcus faecalis
  marker
gtccgaaccattcatgaagccagtgttcatgtcaatgaaacgggggatgaattaacattcacttttcggggcgatggtttcttgtacaaaatgattcggattttagttggtacgctattgaaaatcggcaatgggcggctggaaccaaccgcgattccagcaattatcgcagccaaagatcgaaatttagcaggtccgactgctcatccagaaggattgtatttagcagaagtgaaatatgaaaactaaaaagacgtagaccttacaagaaaaggtctgcgtctttttagttgcaaaatttagatgtatttaacagctgttccgtaagccacgacagattgcatgtctgtgccaattgtgccagaatcaaaacgcatcatcacaacggcatctgcacctaatttagaggcttctgcttttaaacgttcgattgcttggtcgcgtgcttctcgttgcatatcagtgtaacctttgatttcaccgccaactacgctttttagtccagcacctaaatctttaaacatatttttagaacgtgtggttaacccgaaaacttctccaataatttcatattcttgaccgctaattctctcggttgttgtaactaacatgggcaatttcctccagtacttgttggtaacttcaatttaccatagtcaagagtttggtacaacgaatatacata

SEQ ID NO: 1198 - DNA, 657 bp, Enterococcus faecalis
  marker
actgccgcagttcccaaaggcatccgcccatctgtcatcccatttttcgctagtgttgcaacagataacgcattcccttcttgacgattaatcggttcaacaatttcatgaacaaaatcactaacattttctgaacgttttcgcggttgaacttcaagcgttctccactctgctggaacaggtacctgatgcaacaattcaacggtcttatcgattgcttgaatatttttttcgacaactttcatggacttatgaccataacttttcagtgcttcttcttttaaaattggcaacacttgctcaaaaggcataatttccgctaatttgaagaaagctgtttccatcgcggtattaattcgcccacctagtccgacttcactagctaatttcactgcattgattgtataaaactgaatctcattttcagctagataccgttttaattgatttggtaaaaatcgtgctagttgttcatcattccaaatggtatttaagaggaaagtaccgcccttttttaacccttttactaaatcataggtatgcaaataagcggctgtatgacaggccacaaaatcagaatgttcaatgaggtacgttgaacgaatgggtgtctcgccaaaacgtaaatgagaaacggtcaacccgcctgattttttt

SEQ ID NO: 1199 - DNA, 652 bp, Enterococcus faecalis
  marker
ggcttctgctttgattattgcttcacaagaatatgccgaagcacacggtcttccttatttagctattattcgagacagtgtggaagtcggtattgatccagcctatatgggaatttcgccgattaaagccattcaaaaactgttagcgcgcaatcaacttactacggaagaaattgatctgtatgaaatcaacgaagcatttgcagcaacttcaatcgtggtccaaagagaactggctttaccagaggaaaaggtcaacatttatggtggcggtatttcattaggtcatgcgattggtgccacaggtgctcgtttattaacgagtttaagttatcaattaaatcaaaaagaaaagaaatatggagtggcttctttatgtatcggcggtggcttaggactcgctatgctactagagagacctcagcaaaaaaaaaacagccgattttatcaaatgagtcctgaggaacgcctggcttctcttcttaatgaaggccagatttctgctgatacaaaaaaagaatttgaaaatacggctttatcttcgcagattgccaatcatatgattgaaaatcaaatcagtgaaacagaagtgccgatgggcgttggcttacatttaacagtggacgaaactgattatttggtaccaatggcg

SEQ ID NO: 1200 - DNA, 641 bp, Enterococcus faecalis
  marker
ctatttcacgcaatgaaacaagaattatctgttgatgaaattttagcttcggaggattattctgatatccgtaaatggttaacacaacatattcatcagtacggcgcttcacgtaaaccaaatcaattaatttatgatgcaacgggagaagaattgaatcctagttatttaattgattatatgaaagctatttattttgatgtttatcaagtgcaataagtgaaacaagcaaggggaagtggacaacaacaatgttatcaattcgtgaatatttagaagctggtgaaacaacaatctcaaacttactatttgatcattaccaaaaaattggtttgaaagatgatgaatttctctttttactgcaactttttcgttcgcaaaatgcaggcgatttatttccagacttaatggcgattgcagagacgatgggtaaaacgccagatacgatttataagttgttaaatcaattggtttctcgcggatttattcgaattgaaacacaacaaaaccaaaaaggtcaaatgatggatacgtatgatttactgcctgtttttcaaaagattcaattatttttacaaacgagcaaagaaaaacaagttgtcgcaaaccacgaagatgaaattaaacagctttaccaaggc

SEQ ID NO: 1201 - DNA, 640 bp, Enterococcus faecalis
  marker
tccagaagctttctctgcgtgatgaccagttgattgaaaacgttctaaataactgaattcactatgattatctgcaacgattaaaacatgtttaaagaaaggttggttgctatctgaatcctgaataaacaaagattcaatgggctcttcaatcactacgtttttaggaacgtataagaaaacgccactattcatgaaagctgcatgagctgctgtcagcttatcttcttctggtaatacggctttagtcatatagtattctttaactaattctgggtgctcttgtaaagcagtaaaaatgtctgtaaaaattaccccttgttccgctaatgaggctggcaattgctcaaaagcatgaaaagatccttgttgaacaattaaaggattgtctttcatttgatcaaaacttgcgacatttccttcagaaggcacataactttccatgtgaacatttaataaaggccaacgatgaaatttcacacgatcaatatgtggtaactcactttcgtcagcgtttcttaaagccgttgttcgcaattcagtcatccaagctggttcttcatgttctagtgaaaaagcggtgacttcgtcaagataatccattagatttacttttttcatttatcttgtcctccttacg

SEQ ID NO: 1202 - DNA, 607 bp, Enterococcus faecalis
  marker
aattgaggcacatcatttggttgaattaattcacgcttttctgcgcctaaatcctcaaaaatttcattattaatatcgtaaagcttcgatgaaactgtcgcattcagtttgtcatcttctaattttggggcttgtcgtgcatagaaccaaaaaagaccaacgcctgctaaaaaagcgaccatcccagcgataagtaagccaagaaagatttttaaaacaagccgttttttctttttcggcggttgtgtctttttcttgtaacttgacttcgatgaggtgttggatgcatgtctagcagctcgcgagcctgaatttgcggttggcataaatagcaactcctttgttatactttcaaaactttatgaatctagtgtgtctgaatatattgttccactgcgtcgagataagggattcgcggtgcgattccaaaagataattcaattccttctttctcgatgagtgcaagcggcatagatttttttccagtaactgcttggtttttccaatgcgttattagattttcaccactaaaaaagaagcagcgttttaagcttgaaaaccataatagcacaaaacaaatcccttgttgtgctatacattgttccat

SEQ ID NO: 1203 - DNA, 551 bp, Enterococcus faecalis
  marker
tacacacagaatggcaatcgtagtaatagaaaatgaaagcagcgggcttagcagaggaaagccataatagactacgataaattgaatcaacaaaggtgtgttttgaaaaaattctacatagacacgactaattgcgtgtaaaagtttacttttggtcgctgataaactgccaaagaaaatgcctaaagcaaaggcaactaagatcgctcctaaagaaagcagaatagtatagagaaatgcctgaccaaaaattcgccaatcttgaaataaagcctcccaacgatataaggcaaatggcccttcttcaagccaggaaatattggctaacaaaaacataaaaatccctcctaaaatttttgattcttcaagtcttaggaatgattaattttttaagccccagtcttgataaattttttctagtgtgccgtctttttcccatttttcaattaaaccatttagataatcatttaattcagtatttgctttctttgtggtaattccatattcttgtggcgaaaaaccatcttttaaaatttctgtcttgccatcca

SEQ ID NO: 1204 - DNA, 550 bp, Enterococcus faecalis
  marker
accatcaggttgataatcaacgctagttccatcattgaaaacgactttgtttacgtaatacggtttgttataaatcccgttattggcgaaagccgcataagctgctgctaacttcaatgaggaaatcccgtatttatcgccatctacatcgcttgtgttacttgaaatggcatttgacgcttctaagtttttatagtcaattcctagtcctttaatgaaaggcatgatgttttctttaccaacttcatcaaacgtctggaccgcggttgtgttacgagaacccataatcgcacggcgcatagtaatgacgccttggtatgtcaaatcagagttgaagacatcaatgtcggtaccaggatatttcgttggtttatccaccatgaggcgacctgtcgaataatttaaattctcaattgcgggaccataatccatgattggtttcacggttgaaccaacatcacgttgggtgttaacagctaaattgtttcctaattgcacatcatcaggaatgtgacgaccaccaatttgtgctcggacttgtccagaggca

SEQ ID NO: 1205 - DNA, 548 bp, Enterococcus faecalis
  marker
aaagttaaagagtatgcggctttaacaggcaatgaaattgtggtggatgcctattgcgggattggaacgattggcttaactttagcccaagatgcaaagcaagtttacggtattgaagtaattgaagaagcggtcaaagatgcagaaaataatgctaaattaaacaacattgagaatgccactttcacggctggtttagcggaagaattattgccaaaattagttgaaaatggcttgcaaccagatgttgtggtggtggatccaccacggaaagggttagacggtcaattagtaaacacattaattgaaacgcaacctgaacgaattgtttatgtcagctgtaatccagccacactcgctcgcgacattgcattattaacagaaggtggctatgaagcaaaagaaattcaaccagtggataatttcccacaaacgacccacattgaatctgtcacgttattaacaaaggcggtggattaaatgaatgaaaaagaaaaaatgttagaattaattaaaaagaaacaaggtggtggccgttctaaaaaaat

SEQ ID NO: 1206 - DNA, 540 bp, Enterococcus faecalis
  marker
ccgtattgataacgagtaatctcgttgtcaatgcgtcttataagaaaaacgcgcttgagaaagcgttaattaggaggaataacaatggacggatttgttcaatggatggagaaacactttatgccgaaagcgtcagttatcgcagcgcaacggcacttggtagcaattcgtgacgcgtttgtcgtaacgatgccattaatgattttaggggctttggcggtattaattaataatattccaattccaggatatgaggactttttaaacaaaattttcccaatgatgtataacgatgcaccaatttggaaaagctttggtggtaacatttggaacggtacattcgcaatctttgccgttttagtagcctttttagtagcacacaatttagttaaatcttatggaaaagacggcattgcagccggtacagtttctgtagcttcattcttcgcagttggcggcttagaaggcatgggcgcaactggattatttattgctttgattattgcacttatttcaggagaactattccaacgtttatct

SEQ ID NO: 1207 - DNA, 539 bp, Enterococcus faecalis
  marker
accaaaaattagatagcaaagaaatcttggttcgtcgagcaacagcaacagaagaactaattacattagatggtgaaacacgtcaattaacagaagaaaatatcgtcattacgaatggaaaaacgcctgtcggcttagccggagtaatgggtggggctaattctgaaatcagtcaagaaacaacaactgtggctttagaagcggcattgttcaatccattgtctattcgcaaaacgtctaaacaattcaatttacggagtgaatcttcaagtagatttgaaaaaggcatcaaccaagcgacagttgggctagcttgtgatgtggcagccgcgatgattgcagagttagccaacggaacagtggtctcaggcactgcagttggttctgaagtggccgttaaagaagcgcaggtagctgtgactttagagcgaatcaaccaatatttaggcactgcattagatgaagcaacggtgaatgaaatttttgaagcactcggttttgcttatgaagtaaatcaaggcgcatatgaaattacgatt

SEQ ID NO: 1208 - DNA, 526 bp, Enterococcus faecalis
  marker
gaagctttacaacggagccttacgaacagatttattccaatactggggaacacgtccaccaagaaaaccacgggaagactaagaaagctggtgtaaaaaaatgaaggaagctgtatttttacaagaagtgaaagaaattcaattactaaaaaatgccttgacattattagactgggattcatcaactgggatgccagaaaaaagtagtccttttcgaggagaagtagaagggtatttaaccggattatattttgaacgaagtattggcccagttattcaagaagcattggcctattttgagacacgccctgaagaattatctgaattagggaaactggtttttgaaaaagtaaaagaagaatatgctttgaataaaaatgttccagctgaacgtatgcaagaatatgttaaagtattaaaccaagcacatacagattggctaaaagcacgcgctgcacaagatttcggcttgttagaagaaaccttaacgaaggtcgttgcgttccaaaaagagttcattccttat

SEQ ID NO: 1209 - DNA, 499 bp, Enterococcus faecalis
  marker
cccgcacgacaaatagcaataaacagcggtttgtctcatgaaattcccgcaatgacggttaatgaggtctgcggatcaggaatgaaggccgttattttggcgaaacaattgattcaattaggagaagcggaagttttaattgctggcgggattgagaatatgtcccaagcacctaaattacaacgttttaattacgaaacagaaagctacgatgcgcctttttctagtatgatgtatgatggattaacggatgcctttagtggtcaggcaatgggcttaactgctgaaaatgtggccgaaaagtatcatgtaactagagaagagcaagatcaattttctgtacattcacaattaaaagcagctcaagcacaagcagaagggatattcgctgacgaaatagccccattagaagtatcaggaacgcttgtggagaaagatgaagggattcgccctaattcgagcgttgagaagctaggaacgcttaaaacagtttttaaag

SEQ ID NO: 1210 - DNA, 484 bp, Enterococcus faecalis
  marker
ttaacgcggtttggaacatctccgcaaagggcgttaacgagttcgctaatagccctgcgccaccaattaaaactaaaaagccgacgaatgttttcaacgttccttgaacaacatcagaaaatttctttttctgtaaaactaatcccaacaaagcaattaatgaaaccagaatcgctggctggctaacaattgaaacaaataaattcaataaagtttccatgtttttcctccttcttattgatgtgcaatgccattgtcatctaaaactttcaagactttctccttcgtttcatcgtaatcaataatcgcatttaaaggaatgattttttcatcaggaattgaccctaaagcatcttgcaatgttttttcgacaaagaagtaatcagccatatcgccactggcactcccgacatctgtgtgatcaatttgaaaattatctgtatcaacaccgacttcctctaaaatttgttggatattcatttgc

SEQ ID NO: 1211 - DNA, 478 bp, Enterococcus faecalis
  marker
acaaggatttaaaacagtgaatcaacaacgcttaatgcgtggacaaatcgttttttacgatgttgcagatcccgagtcattgattgataaactacaagtaagagaagcggaagtttttcaacaagcagagttaagttatccatctatcgttaaacggggcggcggcttaagagatttgcaatatcgtacttttgatgaatcatttgtatctgtcgactttttagtagatgttaaggatgcaatgggggcaaatatcgttaacgctatgttggaaggtgtggccgagttgttccgtgaatggtttgcggagcaaaagattttattcagtattttaagtaattatgccacggagtcggttgttacgatgaaaacggctattccagtttcacgtttaagtaaggggagcaatggccgggaaattgctgaaaaaattgttttagcttcacgctatgcttcattagatccttatcgggcagtc

SEQ ID NO: 1212 - DNA, 473 bp, Enterococcus faecalis
  marker
gtcaaattgtttgacaacattttcaaatgaaatcacatggtttctcactggataaactcctccatttcgtcctttataaatacgattctgtcgccacaattaacgcacgactttttcctcgaccattgttgctaatttggtgaggttctgttgcttggtaatacatggtttgaccttttttagcaatatacgtggcttcccctaatgtcaaacgaatggagccatcaatcacataaataaatgtttctgatagagaaggttcaaacgttttgtattcgccatttttatcaaaagtaataatgacaggttccatttctttttcatttgaggctggaattaaccattttagttcatagccatgttcttcatcataatagagggtactttcttcttcattgtagacaattttctgttcaagcggttgctgactaaaaaactgctctggcgtcacgcctagtacttctaaaattgag

SEQ ID NO: 1213 - DNA, 453 bp, Enterococcus faecalis
  marker
cacagtaaaactcacaattccagcaggtgtggatttgattttgaaaatcaaaaaaataacataaatccacaataagtttggaatattacgcaccacttctacataaatactggcaagtaacttcagtggtccatgggtttgatttcgcaaaacggctagaatggtgccaaaaatcgtactcaaaataattgagacgaaggaaatatagagcgtcaattttaagccgttaaatagaaattgaaaattatttgctgtcagtaattgacgcatttcttctgaaaaaggcatctgttttcctcctatctgctatatgctttcttatttttttcttccatttttctagccaaattcgctaatgggaagcaaagaatgaaatataagaaaccagcaagcgcaaaggcgggaatatagttcaagttgacagacgaccaactattggcagcaaacattacg

SEQ ID NO: 1214 - DNA, 452 bp, Enterococcus faecalis
  marker
tgataaagtgaatctaaaagaagggattcaagtactctatcatgaagctttagctagtgccaaagcgattgccgtctatcactctatgaacttatcaggtgaaattggcattattttaaacttaacgccgacttatcctcgtgatgagcacaacgaagccgatgtaaatgcggctaaatttgtcgatggtttctttaaccgttcgtttttagacccggctgttaaaggtcattttccagaagatatggttgcttgggcgaaagcaaatgacttattgccagaaacaacgccagaagatttagcaataattgctgaaaatactgtggacttattaggagtaaactactatcaaccacgtcgtgccaaagcaaaagaaacacctgttgaaacacgaccagaaggcttacttccagaagatttttatgatgtctacgatatgcctggcaaaaaaa

SEQ ID NO: 1215 - DNA, 446 bp, Enterococcus faecalis
  marker
tagaagaggcagagtttactctgcagatagatgatgaccgtcaccaatttttcctgaagaattggtgatacagaacatggcttatagaaaattacaagtaattcaggaagaccttccaacgtagttgtgaaggctttttttacgaaaagaataaaaaaatgttaaaataaagaaactgagataaaagtagtaagctgtctgttctaaagaggccggaacaggaccgtttagttcagagaaagcggacaattataaaaaacaagcggagcagtagtcggcaggactgttagctccagacaataaaaaagagtcaagaaggagtttttatgacgaaagaaaaaacattcaaacttgttgcaacggctgctagtggcttagaagcattagttggaaaagaattgcgtgatttagggattccctgtgaagtagaaaatggccgggccgtc

SEQ ID NO: 1216 - DNA, 434 bp, Enterococcus faecalis
  marker
acaacttttagaacgtttcaatggagaagttccgcaaaccagagatgaactggtcagtttacctggcgtggggagaaaaacagccaatgtagtaatgggagatgctttcggcgaaccggcttttgcagtagatacacatgtggaacgagtgtccaagcgccttagaatttgtaagctaaatgcgaatgttactgaagttgagcaaaccttaatgcgtaaagttccgaaagaactctgggtgaaaacgcaccataccatgattttctttgggcgttatcactgcctagcaagagcgcctaaatgtgaagcctgtccgctactctatatgtgtcaagaaggcaaagaacggatgaaagggaaataacacattttttcctaaaaaagcgagccacaagtccaaccgacttgtggctcgctttctttttttgattttt

SEQ ID NO: 1217 - DNA, 430 bp, Enterococcus faecalis
  marker
gaataaaccaatttgattgcctgcggttaaagtcgttgcattttctaaaagggaaatgagtcccagataaagtgaacccgtatacaagtttcctacgcgacgactatagacgatactttcttcataacgggctaaaattcgttcctgttctgcttcagtttggtcggagatttttgctaataaggcttttttgcccatttttgtgtaaggaatatggaacgctaaagcatcataatctgcaaaatcaagaccggttcgttttttatgttcatcccagacttgggcaaaagattggatgtaggtttcgtttgacaaaggaccatcgaccataggatacgggtggcctgttggacgccaaaagtcatagatatcttgcgtcagcatcacattatcctcttttaaagccaaaatgcgcggttcactagcaact

SEQ ID NO: 1218 - DNA, 430 bp, Enterococcus faecalis
  marker
cttatttctctccttcttggataattgatagtatttctgggacggtttcagccgccactaagcgatgtaatgattctttttttgatagaatttttgtcagactagataaggcccgtaaatgtgtttcgttatctgaagcagctaaacaaataaaaaggtgaatttcatgcttaggatcttctaataaatcgacacttttttggatttttagtaatgacatgcctaactgattaacgccatcttctggtcgcgcatgaggcaatgctacgtctggacagatatggataaatggcccaaacgattcgactttttgaatcattgcatcaatgtacttttccgtaatactgccattttttaataacggcttggcagcttctgtaattcccgctcgccagtctgcaacttcaggcaggacttggactgtttctgt

SEQ ID NO: 1219 - DNA, 424 bp, Enterococcus faecalis
  marker
cggtttaatgaaagacttgattcaaacggcattagaagaaatgcgccaagataaacagtggatttcttatcttttcccttacaacatcccttattaccgacgtaaaggttgggaaattatgtccgacaagttatcttttaaaattcgggatacgcaattaccaaaaaccgttcctgttccaggaatgattgaacggttagctgtcgatcacccagatgtctttgatgtctatgcgcgattcgctcgtcaaaatcacggcgcgctcattcgtagtgccttcaactgggaagaatattggcgtttcgaaaacgaggaagaacggactgctgctgtctattatggtgccaatcaagaacctttaggagtacttttctattgggtggccgatgaggtatttcatattaaggaaatgttttacttgaac

SEQ ID NO: 1220 - DNA, 423 bp, Enterococcus faecalis
  marker
taaataatctgtcacgtgaaagcctctcttccttgtatttcatctttcctattctaccatttcttacgcgcaaattctatgaaaaaacaaaggccaacttttccagtcagcctttgtttttattaattcgttaaaccagttaatgtgccataaattaaaaataaattcaataacgtcaaggcaattgcaataatccaagctaaaaatttcacccacgctggattcgcaaattggcccattaattttttatcacttgtatacatcgttaaaggaataatcgacactggcaaagcaatacttaggaaaacttgcgtataaagtaacaagtcttcaacagccgtttcgctaccgccataaataatgacacagataatgactggcacaattgctaacaaacgagttaacactcgtcgtgcccacaac

SEQ ID NO: 1221 - DNA, 358 bp, Enterococcus faecalis
  marker
attaaacttgcaacaattagtagccatagaagcaggcggggttacttatgaagcagtttctaaattcccagcagtttctcgagacattgctttattagtcgatgaaacagttaccaatcaagaactagttaaaactatttcagataacgcaggtaaatatttgaaagagattcatttatttgatgtatatcaaggtgaaaaactaggcgctggcaaaaaatcaatggcgtatagtttaactttcgttaatgcagaagcgacattagtggatgaagaaattaaccgttcaatggaaaaagttgaaaaagcgctaattgaaaaacatcaagtagaagtaagataaaataaaaacaggaaa

SEQ ID NO: 1222 - DNA, 353 bp, Enterococcus faecalis
  marker
aatacaaaattgcgtttgacaaaaaagtaccaacaacaatcacggagacatttaaagtcctatccatggctttgatttcaaaagttggcggagcttctggtcctttatatggtactgcgtttatgaatatgactaaagcgacaaaagatttggaaaccatcagttcgccagagcaattaaaagaaattgttcagcaaggtctagctgggattcagatgcgtggcaaagctgaaccaggagataaaacgatggttgatgtctgggcacctgttgctgaagtaattggaacggaacaatttaatgaagaaaaaattgaacaatttgctgaagcaacaaaagattgggtggcgaaa

SEQ ID NO: 1223 - DNA, 337 bp, Enterococcus faecalis
  marker
acttggtttaacaaaaagatcttgatcgtcataaattgcttccaataaaggttgattcgttttttcttcaagcaaagctgcacgtaatttagctgcacgttgttgcgtaccttcactttcggacagatgtgctatccaatcttccatcaataaacgtaaagaatcactggctacagaaaaagctttggtcattttactagctaaacgttcgcgacgcgcttgcgttgctaacaacatgccgtaaccaaactcggcattatcctctaaaagagaatttgaccaagctggaccttgtccttgttcattagtagtgtaaggtgtcacacccgctgcagca

SEQ ID NO: 1224 - DNA, 337 bp, Enterococcus faecalis
  marker
ctccgcagcagcagcaaatccctttgctcgctcatcatttggataatagccaatcggcaagtcacttaatgctaaatcaactggatccaataacaaatcttgcaatccgtcttgatggaacaactgaatattggcttgtgaccaagcattgttcacagaagatactgccaaaagtgtttcatcgatatccacaccataaccagaaactttgtaaccagctgtttcaaggttcagcagaaccgttaacagtaaatttcccattcctgaagcaggatctaaaatttttaatggctctgatttatttgttaattgttctactaaataaacaaacaaaaag

SEQ ID NO: 1225 - DNA, 330 bp, Enterococcus faecalis
  marker
cagagttatgttttaatagcagcctttactgcttttgctatttcattatcaaaaatcagcgcccgcttctttatccgcggtgttcggccattattatggctaattctgtttactgtggctcttcaaaccttgtttacacaagggggggaagtgtactttcagtggggaattatttccataacccagtttggtgtgacgaatgggctatttattttctgtcgttttgttttaattattttcatgtcaacgttattaactttaacgacggcaccattagagttatcagatgcgattgaatatttgctacgcccacttcatgtagtgaaattt

SEQ ID NO: 1226 - DNA, 325 bp, Enterococcus faecalis
  marker
taattctactaattcaaaaaatatttctcgattcaaactatccctccgctacttttttacaaactttgttacttttaaaacttaattactgtatttctgtcgccaattcgtatacaatcaaatagtattgaaccactgaaaggatcgtagtatatttatgaacacattttggaagtcgtttcctgacgttgaacgttctttaacggaaacatgtgaattaattgaacaaacgttgcatacacgcaacgaagacattgaagaagccttagtaactttggctcgttctggcggcaaattattacgccccgcttttttctttcttttt

SEQ ID NO: 1227 - DNA, 317 bp, Enterococcus faecalis
  marker
ttttctcctcttcgttactattttattttaaatttgaagctttccaagcttcaaattgtttaaagaactccgttactttattgatatctttcaaagaggcaagttttgctaacaaaacttccttcacttgctcagcatctgcacccttgttttgaacaagcaagatacttttacgtgattgttctgacttaaacaattcatcaggtaactgtatcattccttgtaaatagacattttttgtcaaccaatttttaaagaattcactttgctcagtctctaaaatattggtcgggattaagaataagccaaaccctgct

SEQ ID NO: 1228 - DNA, 312 bp, Enterococcus faecalis
  marker
ctttattgttcatttaaaatttgcctcatttcttttaagaaaagctagctccctgctagcttcatcaatcaattgttatattttagttgccttttttatcaaattatcatgtttaaaggtctaggataatcagcacttttcattataccaatttttgaagaagatttaaagcacttcccttttattcttttggtttcgaaaggctaacagagtttcgaaaaatttggtatactaaaaacagtaaatttattggagatggaaaaatggatgaacaagaatttcgaaagcaactgaccttaaagcctgttgagg

SEQ ID NO: 1229 - DNA, 301 bp, Enterococcus faecalis
  marker
accaatcatcgtgaagcatttaaacgtaatgatttgcgcacaggcccaaccgacaccagataaaattgaaaagaataaatccatgcccgctggaaaagccaaaccattaatcattgaaaaaatagcggcaaaaattaatgttcctaaactggtaccgagaatttgattcactggacgaccaccaattttggaagcgattgttgggaaaagcccccaacctagaagcggtcctaaaccgattaataatgcagtcgcattcatctctatttcccctctctcgtttaaaagacaacgttacttt

SEQ ID NO: 1230 - DNA, 297 bp, Enterococcus faecalis
  marker
ctttatgttaattgtgtttgtaatgcgatattcagcaagatagccaccgctacccagccgccacacatcaccagaagcagccaactaaacattgattgttttactaaagactgcttaggctttgccagatgtacaaaattcatgctatttactaagaacagtaaaaataaagcaaaacaaaggacggccaagccagcacaaatccaaatccacatcgtaatctccatctatattcctccttctaacattaactctatttataaaaacagcacattatttttcctttttccttttttt

SEQ ID NO: 1231 - DNA, 275 bp, Enterococcus faecalis
  marker
catggctctacaagcacgttctttagcgatgacggtcggagctactggtaaagaagttgaggcagtcgctcaacaattaaaacgtcaaaaaacgatgaaccaagaccgagccatggctattttaaatgatttaagaaaacaataaaaaaacagttcagcagaaattattctgctgaactattttttttcacattaggtagccgtttcaggccacgaattggttttacttttaagacatctaagaagaaagtgaaaacagggattcctacaataag

SEQ ID NO: 1232 - DNA, 274 bp, Enterococcus faecalis
  marker
tcttaactctttttccgtaatgccttgttgcattaaatattttgttaaacgataatttttcaatttcattaaagctaaaagtacaatttcggttgataaaaattcatcttggaattcttctcgaagtgaatcagcttcttgcaataaatggaacaaattttgacttaaattttgaccatattgcacattaccgcctgccacacttggatattcatctaacgcgttatctacttctcgttcaaatgcgtcaacatctaaaccagcatctgtgtaa

SEQ ID NO: 1233 - DNA, 271 bp, Enterococcus faecalis
  marker
tctggcttcagccagtgccgtcatatcaatataataagggggcacaaaaaaactaattttatcaatcccaattgtcatttctttaactcctttacgataaatagattcattatataaaatagcacgaaatgaaccaaaatggggaatttttgtattaacttcatagattattaaaaaatatcttataagtctgttaacattcagtaattggcacttgtgattctgggattttatgatatatttcaagatggaggtgcatttagttgaaaac

SEQ ID NO: 1234 - DNA, 269 bp, Enterococcus faecalis
  marker
tgcaggtggcaatgcttcttcaacaaatagtgcatcaggcaaacgccatacagttaaaagcggtgattcactttggggcttatcaatgcaatacggaatcagcatccaaaaaatcaaacaattaaatggcttaagcggggatacaatttatattggtcaaactttaaaagttggttaatttaagattgaaaaaaatagctatctttggtaacatgagtcttataatagaaaaaaacaatgagaaggaatagtagaaagaaccatgtgat

SEQ ID NO: 1235 - DNA, 258 bp, Enterococcus faecalis
  marker
atgaacgacgtgctaacattgttagaagataaaggtgttcaagtgaccttccataaagtgggtaactatatgacgtctattgacatgcaaggattatctttaacgatgattgacttggcgacaaaagactggcaaacagcgctagaaagcaatgtaacaacaatttcttggtaagggtgataaaagatggaattaacagtaaaagacattcaaacatggttagacaattattcaaaagttattgaagaaaaaaaagac

SEQ ID NO: 1236 - DNA, 258 bp, Enterococcus faecalis
  marker
gtggcacgtaaaaataataatatcgccttctacgaagtaggacgcgttttctaccaaacagaagatccaacaaaaaatttacctacagaagaaaatcacttagcacttgctttaactggtaatacaatggttaaagattggcaaacaaaagcaacagccgttgatttttatacagtaaaaggcttagtggaaagtattgtagctgttttaggattaacagaaaaaatcagttatcaagcgacaacggcgattccagaa

SEQ ID NO: 1237 - DNA, 256 bp, Enterococcus faecalis
  marker
acttttttgaacaaaccaagtaggaaaagtcggtgacgatcgttaagacgtttgaggttaaggtgacggtgactgaccgtttctttgacgaatttaggtggtaccacgttgcatttgtatgttcacgtcctataggaatttttcctataggacattttttttatcactaagtggctagtttaagtcagaatagtgacaatggctgcaggtggcaaattttaagaatgaaaaattttatattactaggaggaataac

SEQ ID NO: 1238 - DNA, 255 bp, Enterococcus faecalis
  marker
ttgacgccattctccttttggtgcttcaataagaggcgccgttggcataactcctgcattgttaaaaagaacatcaattcgtccatatttttccattgtaagcttgattacacgctgaacttcctcttctttcgttacatctgcttgttgcacgagaatcgttgcttcaggaagttctttttttatagcaattaaacgttcttgtcgacgtgctgcaatgactaacttcgctccttttctggcaagtaaacgggc

SEQ ID NO: 1239 - DNA, 244 bp, Enterococcus faecalis
  marker
tcctaaatttgactttacaccactaagcgaaggcgcctctatggggattcacgaatcacaatcgctctttaatgaaattatcattggtagcaaccgagctttttggcaaaaacaatacccgtttttccaagaatgcgcagaaggcacttttgatgatattgcttttgaagatttctatgcttctttaaaagaaacgaaagcaagtttgatacggattgattccgatagtctcacctatcctttg

SEQ ID NO: 1240 - DNA, 240 bp, Enterococcus faecalis
  marker
tcgtattttacttgcgtgggagcgtaaaaatattaccaccaaagaacaagttgctgctgatcagaaaaaacgaaaagattctatgattcaaaatgagattgaacaacaaggtcagacacaagaatcgttgccaaaggttacattacacaattggttaaatccagaagacagtgaataaaaaggaggtgggccatgctatcaaaagagaaaacaatggaagctattgaaattatgtatgag

SEQ ID NO: 1241 - DNA, 228 bp, Enterococcus faecalis
  marker
atttttagcaacgaagagtatcgccggcggagttttagcagctgttaacttattgatttctattttgatctacatgcctttcgtaaaagtagcaacagatcaatacttgaaacaagaagcagccgcagaagcagccgagtaaaaaatcgaaggattgaatcgtccggactcttacggagggttcaatcctttttttaatgattaaatcgtaaaggagcaaataacatg

SEQ ID NO: 1242 - DNA, 228 bp, Enterococcus faecalis
  marker
tgttccattttttcttgatccaacgctttgggaaagtgaaaactatgataccgttcaaaggcattaggaattgggctattccaaacatagtagctgtattgtttgcctgtggcgttataccgtgcatgaaaacgttcaggcatttctgtaacttctttaacaacaatatcgccaggtaaatatcgatttaaaaaggataacatttcggttgttgttagtgaactagtc

SEQ ID NO: 1243 - DNA, 226 bp, Enterococcus faecalis
  marker
cgcgcaacacacaattcatattctcgggttaatgctagtttgccaatgggttcaagagaaggcttaacgcctgctgctagcggcacatatgcagctttggccatggcaaaactttgctgggaaaacctccaggaagatgggttaaaagcgaaattagcttgtgatgcaaatgtggttactgaatcattgaataagattatcgaaacaaatatcttactttcaggct

SEQ ID NO: 1244 - DNA, 217 bp, Enterococcus faecalis
  marker
ttagatgaaacaccttcaacacctgtaacgccttctgcaccgtcaatgcctgcagaaccagcgaatcatgatgttgataatgcacaaacacgtcaattttaacaagacaatttaagtcaagttttcacgaggaacaaaaagcatttattagaatagcggacacttgttgtagtgtgtaaatttttgctgttcgtctaaacagatttgtaattttcgg

SEQ ID NO: 1245 - DNA, 217 bp, Enterococcus faecalis
  marker
aattgttgggcgaatgtccgcttcatacatcgcactttggacatccaataataacggttcaccaccagcaccgggctctttcgtccgatccaagacagcaattgctttaactgattgaggtactttttcgagaaatgtttcaattggaaatggtcgatagagatggacattaagaaagccaacttttcttccttgttgttgtaaataatcaacagtc

SEQ ID NO: 1246 - DNA, 214 bp, Enterococcus faecalis
  marker
tgacatagctaccaatgtatttacgaatacgatcgataaaaatgttgtatgctgtttgaacttcaggtttatctaagtttgattgaatatcgcgcatgtcgcttgataaaccatttgttaaacctaataaaccagattttttgtttaaaatatcaaccatgtcttgtacatcagtcaagccaagttttgtcattaaataaggcaatagtgacgc

SEQ ID NO: 1247 - DNA, 213 bp, Enterococcus faecalis
  marker
tctgcacaattcggtgttagtgtggctaacttacaagcctggaataacatcagcggtagtttgatttttgctggtcaaaagattatcgtgaaaaaaggcgccaactcaggttcaacgaatacgaacaagcctacgaataatggtggcggtgcgacaacatcctacacgattaaatcaggtgatacgctgaataaaatttctgcacagtttggc

SEQ ID NO: 1248 - DNA, 208 bp, Enterococcus faecalis
  marker
aatttcttgatgttcctggacttgttttggcgtaaaggcgttattggctcctgcgtaaatcataatgctattttcaccagcgttatctaccataataaaggcttggccagtagctgttttctctaaagtggtgaccccagttaaattaatttcatcttgactcattaaatcagtcatcatagctccagcgccatcatttcccacagca

SEQ ID NO: 1249 - DNA, 205 bp, Enterococcus faecalis
  marker
ttgtcatgcttttgcggtgaaggaaggtcgctaccaaggcttgactagttggacgctggatggcgaacaactaattggtgaaatttcagttccgcttgctttagccacggttggcggtgccacaaaagtcttacctaaatctcaagcagctgctgatttgttagcagtgacggatgcaaaagaactaagtcgagtagtagcggct

SEQ ID NO: 1250 - DNA, 204 bp, Enterococcus faecalis
  marker
tcattaatgggataaggaattaaaacgtttaggaaaagtgaatagcaaataaggatagtgcatgttaccaaaggttttgttttgtacgctcgattcattcgtttaatgaggctactgcctttttaataaatataaatggatacaggaggaataaaaatgaacggattaatggcatggatggaaaaatatatcttaccaactgcc

SEQ ID NO: 1251 - DNA, 201 bp, Enterococcus faecalis
  marker
aattcgtttagaagttaacgctgtttttaattctggataggaacctaattcttgataagtaaatttgattccttcctcttgcgcttttttctctaagttttcttttgtcgtagcagattgtgcaacgccgattgtttttccgtctaaatctttcatgctggagaagttatcctctttgcgcacaaggaaaccaatctcatc

SEQ ID NO: 1252 - DNA, 195 bp, Enterococcus faecalis
  marker
tgcatgccatcaattgccgtcgcttgtggtgctgcagagtacgcccaatagccgatttcaccaacggctaatagaagaactgcttttttcataatcccagcactctcagcggactccgtttccgaccagaccgtcattttggcaccaatcatgattaacactaaggcaaatgcgcctaacaatttggctgtcgca

SEQ ID NO: 1253 - DNA, 191 bp, Enterococcus faecalis
  marker
tggcatcttcgatagaagcgattggacaatcgttgcttgtcccaactttttcgaatccaggagcgatttctgttactaaatcaccgtggctcatccaaacggtttgtttcgcaggtgttccttggaataatgtcgcatcaccaaggatttctaattctgcttttccgtattcacggtttgcggcaggttct

SEQ ID NO: 1254 - DNA, 188 bp, Enterococcus faecalis
  marker
acctattaagcacaccttgtgagagcatctcacaaggtgtgttcgtttaattattttagacgttctacgtcacgggcaatcattaactcttcatcagttggtactaatagaagcttgatttttgaatcatcagttgagataactgcttcttcaccgtgtacattatttttgtcatcatcgatttcaca

SEQ ID NO: 1255 - DNA, 184 bp, Enterococcus faecalis
  marker
gatgacggttgagaaactagaccaagtattcgaccaagtaaaacaagggattcaagagattcggaccgttttagcagaaaaaggtacgccgcctagaactgactttttatctagaaaaatgaccaaagaacaacaacgccgttttgtgattggtgtggttgaacaattaggctatgatttttca

SEQ ID NO: 1256 - DNA, 181 bp, Enterococcus faecalis
  marker
ctccgtcaccacccacaaggcaacgcccgttcgtttacttgtatgctctctagtcgcttgagctaaatccattcctgtcacgattcctaagcgcgcagccatactttgtagtaacatggcaactaaactagaaagcaaaatcacactaagtaacgtgtacttatattccgctccgccagca

SEQ ID NO: 1257 - DNA, 177 bp, Enterococcus faecalis
  marker
cccactaaaaccttgagagaaggggccattgttccgtggaaccctattagttcccaatattatccacaaatgttggagcaagcagccaccagttttgggattgatatggatacgccgtttgaagaattacctgcagaccaacaagaaattattttaaatggttctggcgagaaaaac

SEQ ID NO: 1258 - DNA, 170 bp, Enterococcus faecalis
  marker
aaaatatcgttgtaccagaaggaacagttgccaatgtgggtgacgtgttagttgaaattgacgcacctggtcataattcagcagcaccgtcagtcgcagcaccagctactgacgctcctaaagcggaagcatcagctccagccgcttcaacaggcgtagttgcagccgct

SEQ ID NO: 1259 - DNA, 169 bp, Enterococcus faecalis
  marker
gcaacgggcattattcgatattaatttaacgattcaagacggctcttatacagcgattgtcggacatactggcagtggcaaatcaacgctattacaacatttaaatgctttggtgaaaccaactaaaggccaagtgacaattggagagcgtgtaattacgccagaaact

SEQ ID NO: 1260 - DNA, 166 bp, Enterococcus faecalis
  marker
ctatttttaactacattaataacttttcgcccaatttcgtgaaagccaacgtgaaaattgtgagatactaaagttaataatgaaataaattagggcgacgattccgtaaatagtgaatacttgtcctgtttgtgcgtagcgccccattaagatataagatttgcca

SEQ ID NO: 1261 - DNA, 157 bp, Enterococcus faecalis
  marker
taaacgatgtaagacaactgcggccgcttttgactcatcgatactggactcagtcccgacaatcaccatatcaatggcctctttatcttctttggtcaagatcgcttctgcggcattggctgcaaatgtcacaatatcttggctgattgggttcacc

SEQ ID NO: 1262 - DNA, 152 bp, Enterococcus faecalis
  marker
accacctgctgtaaaatgttcaatggcgtgaattgtttcgcctggttttggcatttctttgactcttaatgttgtgtctaaattgatacttccgataattgtaaccgcgttcattttcatccacctcaataaaatttattttttcattctaa

SEQ ID NO: 1263 - DNA, 151 bp, Enterococcus faecalis
  marker
cacttgtgaaacatgggattgggttgatccagcaatttttgaaaaagtacgtaacgaagccgaggcaaaggcagactacgatgttgaattagatatctgtggttcagatgttgatgggcgaatgattgaagtcgcacgagcgaatgctgag

SEQ ID NO: 1264 - DNA, 150 bp, Enterococcus faecalis
  marker
cgccaaggacaattgacaaacgaaggaacaccagaaaagattttttctgcaggagaagcgcttgttgaaatgggcttggatttaccgtttcctgaaaaattaaaagtagctttgaaagagcgtggcgttgttgtgccaacgaattattta

SEQ ID NO: 1265 - DNA, 145 bp, Enterococcus faecalis
  marker
cctttaaaaatatgcatcaacacattgaaatttttgcaaatggtgatgcactgccgtccaatgcaattatgggttctgtcttaactggtagcgatgagattgtcgtagaatcagaagacgaagaggaagaagcatataacgaagc

SEQ ID NO: 1266 - DNA, 141 bp, Enterococcus faecalis
  marker
tagttattcgaagtagataaacgaagaattaaacaggtggattacggctataggcatgaaatgttcagctactatagtcgtttccccgcgttttgctcctaagaaaatagacagatccaacgaagaagggaagacttaaaa

SEQ ID NO: 1267 - DNA, 137 bp, Enterococcus faecalis
  marker
gccactaattcctgaagcacatttaccgaaacaattattcgaaatggaccctaaaaaaattgttggcttaaccaatgatcccaatgttttaaacgggattcgtaaagaacgaatgcgcgcatatggattgcctgaaa

SEQ ID NO: 1268 - DNA, 133 bp, Enterococcus faecalis
  marker
cgtgttaatggggatggaaagaatcgtaccaacaatgcgtgaagcagaggttttagataaccttttagccagaagtgccgttggtcaaaatttaacaacgtatgtgacgtttgccgggcaaaaaaatgcggat

SEQ ID NO: 1269 - DNA, 130 bp, Enterococcus faecalis
  marker
acggacaaaataccgcattcttcattggcacctacgagatacaatagtaatgtttggctttgtcttgttaaccattggcttatttgtattaagaacttagaaaaggtgaagaaaaattatgccccgctat

SEQ ID NO: 1270 - DNA, 128 bp, Enterococcus faecalis
  marker
taatatgaccatcgttttagtgacacatttgatggatgacgtggctaattacgcagatcacgtgattgttttagaaaaaggacaaatcgtccgagcgggagcaccacaagaagtgtttcaagagacac

SEQ ID NO: 1271 - DNA, 128 bp, Enterococcus faecalis
  marker
cccggctgtaactgccaagtcaccataacttttggcaatccaattcaaactggttgttgttcctcgtgtaaataaaacttccgctgtttctttggcatggataaattggcgaaccttttcgcgggagg

SEQ ID NO: 1272 - DNA, 121 bp, Enterococcus faecalis
  marker
tcttgaaggaatttggggacaagcacaattaatcaatattgatattttccaaaaaggttatgaaggaaaaacaggaacagctgcggttttagccgctattgacgacggtaaagcctacatg

SEQ ID NO: 1273 - DNA, 121 bp, Enterococcus faecalis
  marker
cagtaaagcaattgcaaaaagaatacttaacactgggctagcaatattaccaacaatatctggatttttcagagcatcaaataaatcaacaaatttacctaattcactgttggttccataa

SEQ ID NO: 1274 - DNA, 118 bp, Enterococcus faecalis
  marker
agcaatcacacctgtgtggtcttttggattctgtggaccataaatcgtcaagccctcgatagcttgcaacttcggcaaaacatagtgaacaagggctgcttcatgttgatgaatggcc

SEQ ID NO: 1275 - DNA, 115 bp, Enterococcus faecalis
  marker
gaacctaaaatgtttaagtcgattaattggtctagtaacatttttactgccacttcatggttatcaatatcaacaattacttcatatttttgtccttcaccatatttaattgtga

SEQ ID NO: 1276 - DNA, 111 bp, Enterococcus faecalis
  marker
tcttcatttagttgcgttaatgttaaatggtggaaagcatgttgaagatcatcgactgatctatacaaagaccagctatttacatgcagaaacgttagaaaagaacaataa

SEQ ID NO: 1277 - DNA, 109 bp, Enterococcus faecalis
  marker
gattggtaactctgttttactagacatgaatttaggatttagcacgtaagattcaaataaatggacgattgtaattaaagctaagatataaatcacatcgttcaagcca

SEQ ID NO: 1278 - DNA, 106 bp, Enterococcus faecalis
  marker
cgttagcacggcagggacttccatatcgttgaaaatagcaggtctggtatattgtggatgctctaataggccagtggaatgtgaatccgtttgtgcagaaagattg

SEQ ID NO: 1279 - DNA, 100 bp, Enterococcus faecalis
  marker
ggttctgcagaaactaatcctgacgtgacaaataacattattgatttaatggcagatcaagaaaacattgagaatttaggtggcacactacgtttaggtt

SEQ ID NO: 1280 - DNA, 5986 bp, Enterococcus faecium
  marker
  misc_feature (3983)..(4023): n = a or g or c or t
tttttttatatcttttaattgaagcataatcacccttctcccgtattgaaatattcggtatactaataagtatatcagaacaatgatcgtagtatacgaaataaatgttaactgaagatgaactacaagaaaaaatctagaaatttttcaaaaaacagagggagatcaatgaatcgtattttagtagtagaagatgatccgcaattacagttgctttaccgttctgtgttggaacgagcgggcttttcagtcatcaccgcattgaatggagaggatgcgctgaaaaaactagaagcgacacgtatagaattaatcattacagatatcatgatgccgaaaatggatggctatgacttgctagactcattacgtagcaccagatttgacacacctgttctaatgattacggcaaaggccgattttgaggataagaaacgcgggttcaaattaggagcagatgattatatgacaaaacccatcgatgtcaatgagatgatcctacgtgtggaagcattgcttcgacgttcaaagatcaattacagcagtagcttgataatcggacaaacaaaattagagctagatgcttatacagtgttacaagatcagcattcgttgattctgcctcaaaaagaatttctgcttctgtataaattactgtcttatcccaacaagatcttcactcgccaacagttgatggatgatatttggggattagatacgaatacagaagaacgaacgatcgatgtacatatcaaacgtttaaggacccgttttgaaaagacggaagattttcaaatcatcacagtacggggactaggctataaggcggttatttaaagatgaaaaaaaagctattttcacaattatggatctattttgctagtattgtcttcatttcgatcttagtgacactgctgtgttttctcggttttattttcttattgtctcgacattctatctcgcctgctgaatcggctggaaaaccaacgttatacccgttattcgtctttgcggggttcagtatggtcgtgggtacaggaatatcgatttttgttgggcggcgtatcctgcatccaatcagtgcgctagggacaaatatgagtctggtagcaacgggagatttttcgattcgaatggatgaacagcagaaagtagcagaagtacagcaactgtataaagattttcacgttatggtccaagaactcaatagtatcgagacactgaggaatgactttgtgtccagtgtatcccatgaattcaaaacaccactagcaacaatccaaggatatgttcaattgttacaagccccaaatctctctgacgaagaacgccaaatatttttatatcggattatcgaaagtatcacgcagctttcacaattaacagagaacatcttaaaattgaacaaactggaaaaccagcgtatccaactggaaaagaaagagtatcgattagatgaacaaatcagagaagtaatcgttttttttcagcctaaatgggagaaagaacagctagaattggatatcgaacttgctgcagtaaattacacaggcaatgaagagtttttgtaccaagtgtggctgaatatcatggataacgccataaagtacaatcaaatcaatggacagattcatatcaaactatttgagacagccacagagattgtactggaagtgaccgattcaggtgtaggaatgaatgaagagaccagagatcgaatgtttgaaaaattttatcaaggagatacaagtcgtcaaatttctgggaatgggctagtgactttcactggttaaaaaaattctagaactgcatgatggacgtattgattatagcagtatcgaaggagtaggaacgacagcaatgatacggttaagtaaacaataggaaaaagaataaaacccctaaaaattctattgaaggtttttaggggtttttagtcgtttttttgtgattagggaaatgttcttacggttcttttggcataaaaatcgctgctttcttattgaactacgagaaatgttagaggtgtcattgaaacaaggacatgatgcaagaaagagagcgaaagtcatgcgtcgctctctttttttgggtggatagatggacagaaaatgtagggcttagttttcttcttgatttaaatactcccaaaatgtatctgaagccaaagaatgctcaccgactttacgagtaaatgcaagataactctctgttgttggagaaatagggagaatcacagtattttcttttaatagattcttgactgttttttccataacaatagcaatccccatgtcatttgcaatcatattgatgatcaagtcgattcttgctcctttataagagatttttggttcaaatccagcttcgcgacacagatctagtacaggttgatacaagttcgtagtggggccaaggagcaaaaagttctcctttttcagttcgcttagatccaatttctttttactagctaaaggatgatttttaggtagaactgctacaaaatcgtctgtttcagtaggcaaccactcaatcgaacttggtggggcctggaaacttctagcaaagtggatcgtgtcactatgttcattggcgtcattgtaagttaattcgacactttccacttctttcaactggactgtaaattcaggatggcgtttcaaaaactcggtgattttggaaaaacctttataattgatcattgtcggtatcgttaagatatttaatgaaagattgttgtctttcgtataggtttcaagcacttcttgcatagcatggtattgttctacgacattttttacatatgggagcaataagcttccagcttcggtcaattcgatttttctatgggcgcgttcgaataatttgacgtctaattctgtttctaacgaaagaatctgtttagaaatatttccttgggtggtgaattgtcgatcagcagttttggtgaaattcattgtttcggctaaatcaagaaaaacttcgaatttatggatatccatcatattcctcctacttattccaataaagaatactttaacacaaaaaatgaattggtgtaatcttctctgtctgttacaatctttcttgcagcgaaagcaataattacagaaatttttctgaaatttttttcgcttcgtagaaaaagagaggagattttttgatgccaactggagttttgatcaatgtaggttccgttttgtttggcggactaattggcggattagtaggaaataaattaagtgaacattttaaagcacagctgacgatggtttttggtgtgtgttcgatggggatgggaatctattccattgcgccgatgaaaaatatgccggctgttatttttgctttagtgataggaacagcgattggtttgattgttcatttaggtaatgggataaataagggggctgcgctgatgcaagtacctatttctaaaatcttccctagtgaaaagcttggtatgacccacgatgaatttatcagcacattagtgacggtcattgttctattttgtgcaagtggtacggggatctatggaagtttagattctgggatgacaggagacagtacgattttgatttctaaatctgtccttgattttttcacagcagctatttttgcgtgtaatttagggtatgtcgtttctgtgatagcaattccccaattcattattttttatattttgttcttattggcaaaatttatttatccattgactacaccagacatgatcttagattttaaagcttgcggcggattcttgatggtcgctaccggttttagaatgatcaacgtgaaaatgttcccagtagctgacatgatacctgcaatgatcgttatcatgccactgagctggatgtggacaaattggattatgccactgttataataaaaatcaaagagaagccattttttgctgactaaaaaggatcaaatcttttagtcagtttttttgtatttgacaaactgattttgaaacnnnnnnnnnnnnnnnnnnnnnnnnnnnnnnnnnnnnnnnnncacttgagaatagaaggtgacgtaatgcacatccagattccaactgttcttcttgatggtactgtgctagcagcattaagcaaggaagatatgtatgggtatgccttaacaaaaatcgtacaagaaagtctctctgtcagtgaatctacactatatccggttttgagaagattgaaaaaagaaggatatcttgagacctatgatgaaccttttgaaggcagaaaccgtcgatattactcgttgacaccaatgggaagtcgtcatttagaagaaattattgatgaatggattgtttttcgagattctttagaccggttattggaggagagcacaaatgaatgaatatttgaatgaagttgtggatcatcttcaagaaattcctgaagacgatcgttttgatttgatccagtattatgaggaatattttttagattctggaaaaacattagatcagatcattgatgaatatggtacaccaaagcagtttgccttaaaattaaaaatcagttacttttcagaagaagaacaagcagaaaacgagttagtgaaaaatccaaaaagacaaattcgcctgatttggttaatcattatcggtttatttgcttctcctgtcctcattccactagcactggggtttatattggttattgggggactattggttgctttactagcgctcatttttagtatctatgttttatgtatcagtatcttaggtgttggcctattcatgatcatctcaggaatcagtgtgtttggacaatcgattctgagtggattattctttatcggtgtcggtctgttcgccacaggaagcgcagtatttatttcgccactgttgctgaaaggaacaaaagggcttttttatgtcatgatgaactttgttaaatggatgggacgacgttttattacaaaaagagatctgcattcagcgggcgtttgaaggaggacacataaattgagattgaaacattttttgattaccggtattggtctgatgcttactggtggcctcctagcaggtgcaacttatacattaggcgctcaaaagagtctgacttgggataatggtcctcggttgatcgatatggttactgagacaaaaaaaatcaaggatgcaaacaaaatcgtcatccatgcagaaaatcaaacagtttcggtcatacgcggattggattttgagataaaaacgacttatgataagacagaaaagccagaaataaaggagaaaaatggcgtgttgactgtgaatgcagtcaaaaaatcaacaggtgcaatcattagtttagaagacacaagtgcacaaatcactattgttgtccctgcagatcatgaattatctgaattgacaatcgaagggaataatagtgcaattgatatcaacgaagtatcaatcaaaaaagtgaatactaagacacatgatggctgggtatcgttcaatgaatttacaggaggaacaataactgcgaaagatgaattaggctcacttcgattagatgaggccaatgtggataacttgatcgtcacaggtgaaaacagcaacttccatctagaagacagtttgatcagcaaagaaggaaaagtcatcctaaacggtggcaatttatctttgcatgagatggaaaacagtggctatactatccaaacgtctggtgaatcttatattgaaaaagactaccagccaataacaaatactttgttagaacaaggacagaaaaagctaaagatcactgctaaagacacatcgatcaatattacgacggatcaagaggacaatgaaacagattgatcctgtactcaactggatattttaagaaaaaacagcaaagatccttccaatctttgctgtttttcatcgcttaacgcacataactatagtaaaataagaaagaaaatatctaaaaagaaaacagggtgaaagagtatatgaaggtagaagaaggtcaaagagaaaagttaaaaa

SEQ ID NO: 1281 - DNA, 2830 bp, Enterococcus faecium
  marker
acgaagcttgaacaaacgtggaagcatagacagcacaacgaaatacaatacttgagataaagcgaacaatgctacgacaagataaaaattaggttcagcaaagtttttaagataacctgttaggcaaagagaaccaggtgctgcaacgatcgtaatcagcggacgtgtcggatgagccatatttcttacgaaaaagacacgtttgatgatgatcggcaataagaacgcatagcagatcaatgaaatccaaaagaaaatttttccaataagtgggaagaagttcccggcagttacagtgatgaccccaaatccaacgtaaatgataaaccagcttggataaattgcttcaattgaaagatcagctttgataacatggtgataattgaaataaaagacaaggatcacttggaagataacagcgcacagccaaatgaatttgacaattggtgcaatactttcatatgaaacaaaataagtacaaataaccatgagtgacatcgtaaaagttggtgaaacggaggcgatgattggatcatgcaacgtttgtttcgtgtgttcgaataagataaacaatttaacaaaaatgaatatcataagaatcatagagataccgccagttagattgcctaaagcaacatggtgatagtctttaaacagatttccaagggaagctaacccaaggatcaacccgcagatcgggatcggaataattttcaaaaagttcttcatatataatattctcctttttatttaatagattttagtaccaagatgaacgaatacattgtaaaatgaataggaatgtatgattacgagcaaagcagacagctgattgtcttcatctaagttactagttggatcagcaactgttttgttgtacatttctattatagatggttttttgtatatttaaatcaaatagtttttatagtaattatcataaaaagttatggaagtggtgccatgtttaagttattaacgacttttcgagcagtatatgaaacaagaaatttttccagagcagcagaagtactgtttttatctcaaccagcagtctcgaatcaaatcaaacagttggagcgggaattgaatatcgatctttttcaacgtaacggaagaaaagagatgcttccaactaagcaagccgacttattatatgaacggacactggttttgttagaagaatgggaagaaactcagcaaaaattgctcaatgaacaaaatgaagaagaagtatgtcggatcgttgcttcccacacctttgctgtctatcttttgcctcagttgatgaaacatctgatcaaaaggtttcctaaagtgcattttgagatcgaaatcacgaattctcatgaatcattagaacaagtagcgaaacatgaatccgattttggttttatcgaaaagccattagagacttccggcgtacaaagatactctttgatggaagaccagctagtcatcgctggggacccaaaaagcaaattgtggcttgtaagagaagcaaactctggtgtttttcattacacgcagcgttattttgaagagatgaatatccaagataagaagatgatcgtgaaaagtaacgatgtaattgttgcgttgctgaaggaaggaatcggtcgctcgattttgtctaagcgctctgttccagaaaatgtgccaatgactccgttgaatttccatcgatatttttatttcatccaacgaaccaatctggtttctgatcagctgctagagattgccgaagagatccttcgatacaatgaaagcacagaaacttctcacagcgaggagaatctcagctggtagataattgcatgtatcaaaaaaagttctatgatacactaaagataagcagtaggcttttgtactgcatttgctcaagcaactgcacaaacggaaagttaatttttcccaaatgtctatggaaagactttccattatctaactggaccgctataataatcagcagtatggtttttaagaaaagggatgaaacatggaaaaaaaattaaaagcttcgaacgataatcgtattgattatggcgtgattttaccagtctttctgttatgtttgattggtctgctctcattatatgtagcacttagccatgatccgaacaatccagcagtcttgaaaggcgtagggatgcaagttgtctggtatttagttggagcggcagcaatcgttgtcatcatgcatttgaattccaaatggatctggaaactgactccttacctttatggtttggggttagtggtaatgggactcttgctcaaattctatgatcagaatttagctgcttcaacagggtctaaaaactggtttcgattcggtgcgtttactttccagccagcagagttgatgaagattgcgtacatcttgatgatggcactgatcgtaactaaacataatacgcaagtaaaagaacggacgatgaaatcggacttttggctgattgggaagctcttgatcgtgacaataccggttttagcattgatcatggcccaagatgactttggaacgatgcttgtctttcttgcgatctttggcgggattttcctgatgtctggaatctcttggcgcatcatcgcacctgtagtaatcttggcagtagtcgttggagcaggaacgatcttcttggttacgactgaaggcggaagagacttgctttataaagttggattcaaatcttatcagtttgcacgtattgattcatggctggaccctttccatgatacgtcaggaatgagttatcagccggcccaaggacttttggcaattggtaccggtggcttgtttggtaaaggattcaacgtaagcaatatc

SEQ ID NO: 1282 - DNA, 2450 bp, Enterococcus faecium
  marker
ctttcttgcctcctaacattttcttacacttaaaataatagtagactttcaatgaaaagtacaacaaaatcatttacctgagaacgattttcagttcgcttttttatccgtaaagccaatcatttttcagaatcagctaattcttctcgcagttgagcaaattgctgataagtctgtgctaaatgcttttgtgtcgaaacaaataatggatagattttctgatattttttatgatcagtttcttgtactccaacttgctctttcaattctatcaattcctgtgcttcactgatactttggatctttccgatgcttctccagcctaaaatcacagctcctaatgcggatgcttctgtgacagtagggaaaacaagcgggtaacccagtacatcagccatcatctgacgaaaaatcggagattgagcaaacccgcctgtagcacggatctctgtgagctgattttcctggcaaactccttttaaaatccgataaaggttgagacagatcccttctagaatcgccttcatcatttctttttctgtatgttgccgctgtaaaccgataaaactgccaaacgcatctgcgtcccaaagcggtgctcgctcaccaagtaaatagggatgaaaaatcagaccattggcacccgctggcacaaaagcgatagccgaaagcagtgcatcatatggattttctcctttttctttagcagattgaacgacttcctgtaaaaatgtatgccctgcccaatcaaagatgccagcaccattgctagtcgctcctcccactacccaatgtttctgatccagaacataacaaaacgtctccatttctggatggaactgaggctgagtagtaataaaacgaagtgctccgctcgttcctacggtcaaagcggcgatcgtatcaccaaaagcacctaaccctagattagaaagcggcccgtctgcccctcccaaaacaaatgatatatcatttggcaaacctagttctgctgctgtttttgatggtagacctgttacttgataggtggaaggaaagacttgcggcaattgctctattcgaatgttcaagtagtcaagcacttcttctgcccattggaattcatggatatcaaaatatccagttcctgaagctgttccgtagtcgctgatcagttcgccaaacaatctataaaagatatagtctttgataccgacaaaataagcagtttttttgaataattcaggttggctgttttgcagccacttgattttgttcaatggtgtcattggatgaatcggcgtcccagtctgccgataaaattctttgccaagcacggtatatttcagtttttctgcttcgtccgctgctcggttatctgcccaagtgatcattcgagataacggtgttttctcttcatccaacaatatcaggccatgcatcgcagaggagaaggagacaaattgaatgattgtgtctgaaggcaactgtttaattacttcttttataacggtgcagacaccttgaaagatcaattcctgatcttgttctgccatcccttgtgtttcttggatcaaagggtagcgaaaataagcggatgctgcttcttgggcttcatctgtgaaagcaactgctttggtttgtgtggttccgatatctaatccgattgaaacgttcattttttcacctcaaattttatgtatgtacaaaaatttagtttaagcttgcgtatcttggttttgaaaagggggagatggcgtgttactttattttatcattggttgctgtatcggatcatttttatgtttaaccgcccagcggattccgttaggtcactctattatttatcctagatctcattgtgtcaaatgctgtcgttcgctttcttggtatgaattgattccgattctctcgatcatcgtccaacgatttcgctgccgctattgcaggtgtcggttgcccttctactatttgttggcagaagccttatgtggtggtctttttgcctggttctttactttttcttccgcaagaaatttttcgacgttcatatggatgctttcggctttgctattttcgttgatggatttattttacttcatggtccattctcacacgctattctgttcttgggcaattttatggattttttggttgcaggccggcgtcttccaatggcaaagtgtgctgttaacgtttatcgtaggcggtgtgtgccttcgctatggtcaatcctatctcggagctggcgatactctgttgatgctttcttggagtggtggcttgtctctagaagagttgcttcagatcttgtttcttgctagtctgtttggaatatccgttttttctgtttactttatctgtcataaaaaaaagttggaaaagctgcctttcattccttttttgagcagtgcgttgctgattgtccttcatcttaggtattgaaaaaaggttgtgacaaacgacttgtc

SEQ ID NO: 1283 - DNA, 2441 bp, Enterococcus faecium
  marker
acgcgtttctcgttaataattatttaaaaaatacgcatgaagactttctaaaaaacagataagtcatcatgcgtatttttatttgtcagtcaatataagttgtgctattttatctgcctgtctcagattccatggatctgtataaggtctagctactgctgcagttagccaatccacaccttcaacaggtattccatagcaataaaagtcagactggatttcccctgaagcatcaatcacgcgattcgtacctcgctcaacatctatagcttctgaatgataacttcctgtattatctgaaaatgaaaaagggcgaacaagtttgttttccttcaaattttttatgacaggattacttgaacgagaaaagcttgtttgtggcaatcgagcttcaatcaaatagcgactgctgatttctttatcttgtagagaaataacatagcggttgtgcttttgctgaatatcaaatggcggttcgatcaaatgaaaaatacccgcatctatcagtgctgctaattctttcgtccgaatgattggcggaccgatcgttaaaaagctatttagatgagtaaaccatccccatagtatttctttgtattccttagcagaaaaaacgtgccattcaatagcctgccggattggatcacgccagtcttttaatgcatcaaatgttgaagcaaatgctcctgtgcaattgcctttttccgcttcttttatctgcccttcaataaatattcggctagcttctgaaaagggctcattctgataggcaagaggagtttctaaatacgaccaatcccatctataagggattagtgctggatgctttccgagacactcctctgaagagagggagagaaaatcatgctcaaaatttttctttggaatcggcaagtgatattcttcgatgattttcttgtaataaaacaactcaacgtcttttttcagatagtcaaaaaatgtttcgccagtcaaaaatcccgactgatgccattgctccaggttttcttttgttagtaaccgtggccatgccattgctccgccttgcttttgatttcttcctcgagggtaataagggagcccccttcttgatccactgtatacaatcggttccttgcctgatggatgatagaccagttttcccttttcgttctcgaagcgccctcctcttgatactgtaaacaatccgacataatcaaaaaaacttaagcctagacctcttaaaaagacattttctttaggcggtatcttcgaaagatctacatctgcaggattagaaggaagctgatacagtaaaacatttttctttgcgtagtctacccacactctttcttcttctgtctcatcattttcccagtgaccgcttgctaaaacaagctgatcgatagaatagctttgctgatctgtctgtaaaagataaccatcttttcttttgcttactttttttactaaagaataaacaaactgaatagaagctggaaattcttcttgcaactttgagaaaaaccagcgttgatagagtccgtataaacatcgagtagattgctgatctttttccagacgattgatttcttctataattagttgcttatttttggttaccgtctgttcgatataatctgtagcaggtcctttactccattgaaacaagttgggtccctgtgttaccaatcctccactggacaatgtttcatctgtaaaaagcgtcacttgttgagaaacagaattcattaataactccggtggctgattcaaccgccaaactcgacctccaggaccattgggatcgaaaagaaaaagttcaagagaatgtctgtcctgattattatggagaatcctttctgctacacttaatcctctaggtccggcaccaatgatccctattttcatttgcatgcctccatttcgataaattttttcaataaaacagcatggttctgatgttcattttttgcaccataaacaaaagtaatgactggatgttctttcataagttgactgagtttaaaaatagcttgcttcttttcttcttcgaaaatcaattcttgctggtatttctttgcaaatgaagcaaatcgttctggtacatggtcaaaagttttgcgtgcttcattactaggtgcaatttctttcaaccacagatctaactgcgctttttcttttgaaattcctcgtggccagaatctatccacgagtattctatagccatcctctttttcagcatcaaggtaaacacgttttaatttgatcatagttgtttccttctttctaccttttcgcttagcttatatatgtagataatagcacaaaataaaaaaaatgaacggcacaactatccattgcgccgttcatgtgatcttggtcaaaatctaatgattgattcggtttttaaaaagctgtcatacaatcatctgttttatacttttttacttttgattttt

SEQ ID NO: 1284 - DNA, 2083 bp, Enterococcus faecium
  marker
gatcagcatgattttattcagttatcttcaaaatgatttttccgatgtttttgtttgcttccatatattcatgcgcttgtttgactgcgctgaattggaatgtacggtcaatgattggccgaatcttgccattttctagaaaaggcccagctttttgcataaaagtttgtgcgagctctgctttatactgatcacttctaggtgtcaataatgtaccaagcagttggacacgtttcccaatcaatacaccaaggtctatctcaggcacgatggtcccacctagcataccaatcaagacccaacgtccatcaacggctatagaagctaaattcttttcccagtaagaagcgccgatgaaatccaaaataacatcgactccccgaccttcagtgatttttcgtacctcttcttgaaagtcttgttttttatagttgatcaattcatctgcaccaagttctttacaaaaggcgagtttttcttctgatcctgcagtaacgatgattttcgcgtgagaaagctgtctagctaattggatcgctgctgttcccacaccacttgctcctgcatggatcaagacagtttcgccttcttgtaattttccaagccagtaaagtgtttgataagcagtcaaaaaaacttctgagattccagcagcagaaacatagtctagcgtatcagggagaaggattgcacgatcggcaggcatcacagcatattcggcataaccacctagattgactaatccgtatacttttgtcccaggagtaaaagtggagatatcacttttattctcaactacctctccagctacttcgactcccaaaatagggtagggaggtttcaaagagactgattctcttttcataatatctgttcgattgacagctgctgtatggactttgatcagtaattcgccttgttttggtttaggaacaggcacttcaatttgttctaatacatctacagaaccaggatgcttgattgaaatggcacgcatggatctattcctcctttgcccattcttggaatgctgtattcaactctttgctaccttcagaaagtactagagtcgtacgagaaatatccgtttcttccactagagcggcaagtacagcagcaactgtagagcgagtgatcgtttttgatgccttctcattaggcttagttaattgaatggaagtaacttcttcatcgttagtcaatgtgactggttgaagaatgacaaaatctaagttagttcgtttcagccattcatctgcataatgtttagtaatataataatctgtcatggactcaggccattttgctggttcatctgcataaacagcactgaccatcagatagcgagagacatgcgcattttcagctgcgatcactgttttgattgcgccatccaagtctacttgcagaagattctttccttgagagccggcagcaaaaatcaatacatcgatgcctttgaatgcttcggtcattttttccacggaccaagttaaatcaaaagagacatacgaaacattctctttttttactaatgtttgggaagcaacatctctcacccctgcaaaaatttcatgggaacttggagctaaatcttttatcaggtgtcggccaatttgtccgtttgcacctacaacaaaaattttcaatttggatcatcctttcgacgtcaaatctttccattcaatagtaacaccaaaagagaaaaaaatcagagatcggctacgatgactatcagttagtaagagaagggtgcttgaagtatcttaacaagacattgcatactgctgcagtcgcaagacctgcgacgattccttcaggtataccacttgtaaaaataaccgctagaatagctgaataaacagcatttaaatttgttccgatgactttggcataatcttgctggaataaaaagtagatcatattcatcactaaaatcgtattggtcaatgaaccggaaagtccagctaagaataaagaaacggaatctgctttttgtttcattagtttgcgcagacctttataaacgaaataaggaaccaccccaatcaagatgcgaggaataaacgcgatcagcaaggct

SEQ ID NO: 1285 - DNA, 2021 bp, Enterococcus faecium
  marker
cgccagaatcaattcttcattcatttcatcgtctccgtttttaactttctgctcataatgatcgcatcttccgtcggattgcgataatatgatttccgtttacctaatatacgaaacttttctgattcataaagttttcttgctgcttcattagatagacgtacttctaaaaaaacatgcagcgaatcttttatttgttccgtaatcagtaattgtaacaaatgccgtgcatgcccttttccttgttctgaaactgcaacagcaatatttgtgatctcgacttcatctattactttcgagtatccaataaagccacagatctggttatcttcagctaaaagcagataatcagagtgaggctgttggatgtctgccaaaaactgcattttcgtccaaggtgaaccatgtggataagcattttcgctaatcatccatacgcattctgccaagtacgcttcatcaaaatctttttttctgcaaatcaactaatctcactcattttctaaaagttttatcatatccaacgcatcttcttttgtttcagtgtaatatctttttttgatcgttgttgcttgaaaccccaatttccgataaagtctttgtgcatcttgattactcatacgcacttctaatgacatcgtctcacagcgattcattatagcaaagttctcgatttcgtcaataagcagcgaaccgattcgtttacgctgatatgccggtcgaacggcaatattcgtgatatggcaatctaaaccgaacgctcttgaaccgataaaaccaatcattcttccattatcaaagatacctagatatagatgaggaagcggtgacttcaattctgatataaaggcactttttgtccatggcaattcgccattatagacttctcgttcgacatccagcagctctttgatatcttctgtagtcaattctcttagtacgtaacgacgatcgatttgttcgactgttttttctgtataaatcattttatcttgaaaaaagcttctggcatacgctctaaattttttcaacataactttcgtctccaggtgtgtgcgtctccaaccatttttcttctgcttctactcgttttaaatagcgaggaagaaaagcttgtttctctgcaactggttcaactaaagcacctaattgagccacagttacaccacttggaatatcccatgctggaactgtattaatcatcgcactaggcaatatttcctttatttcagagaagaatttgtgacaatcactcccgacgaaataaatagcttcattcagcttttgtagttgtgtgaacaaatcagaagcagaaatatgtacatcttcaagtacagtttctaatctattttctttccagcggtatgccccagcgtatacattttttcttcgagcatcaaacatgggcacaataatattatccacaccgatgcaattagccgcgatggttttcagactagatactcctactagctctttatctaatgtataagcaatcgtttttgctgtcgttacacctatacgaagccctgtataagaaccgggaccatcagaaaccgcgattcggtcaatgtcttttggacttatttgaagatctgcaaacaattggtcgattgcaggcatcagtgttacactgtggttgcgtttgatatttgtttgtatttgtccaagaatttgttcgtcttctaccacaccgatcgccaaagtttggtttgcagtatctattcctaatgtaatcatatatttgatcctttctgctatgacattctcgccttccattgtagcatacttttttattctgaggatgaaaataccaaaggcaaaactagtacaataatacatgattatctgctggcgggcaaattttgccccttcctgaaacacaaaaaaaaagctgcggtatcactccattttcccacagcttttccatcttttatttcgttgattctcgaataatcaactctgtttccacaataatctttcttgaaaccggtgctttggaattacttaattgaagaatc

SEQ ID NO: 1286 - DNA, 1651 bp, Enterococcus faecium
  marker
caccttttctttttcaccatagggaataaattcgttatcgatcgaaccataattcgtactgaacaaaccatatgtcttgtgatagtcatttttaggcaacaaatacacggtcaaaccgtttggcagtacttcatgataaagtgtttcattgatttgctcatattctgttttattcatttgcatttcctcctgctaaaaagaagattgcctgcaattcgatttgctcagctacttgttgtatctctttgatcgttacgctctccatacgtttcaaccattcttcatcagataattttgtttccggcagccagctgtccaaaaaagaagcttcgattgccgcttgcggagagtctagagaaagcagatattggtttctcagcattgcttttgtctgagacagttccaactctgttatttcaccatttcgcaaactttctaattgctcgtgaatcagatgaagtacttgatttcggttcttttcatcgataccggtttggacactcatgaatcctcggaacgtatccacgctactagaggcataataagctagactttctttctctctgacattcatgaaaagtttagagtgaggaaaaccgccaaataaaccgttaaagaccattagcgcaaaacgttctggttcatcgtaatacacatttgtctgataagctaggttcagctttgcttgaacgattggctcacgtacttgtcgttccttcacgatattcacttgaggttgggtataaaacagatctggataaactgtttcccgcgactcaaatggtaattgcccaactgcttcagctgctttgtccggatcaacatcgccgacaacaaaaatgtcgatttgatcatttgccatcatttcttgatagtaggacgctagcgaactagcagtgatcttgtccaaatcttcgactacgcccaaccctgggatcttttgttccgggctgttttcaaaataaagttcttgcaaggcataggaagcaaaagtttgtttatcttccttcaaactttccaaatatagacgcagattgttcttttccaagtcaaacgtcaactgatcaaactgatgatttttaatatttggataaaataaaacctcttttaaaaaatctaccgcttgagaaaaaaggtttggatcattgacatattcaccattcacaaaactgatccctgcgtttagccaatgtaaatttcctttttttctaactgataatccaaagcttgcgccataaagctctgcaagttgcgcacttaactttgtctgatccggataattcaaactatttgtttccaacatgctgctgagaagtgaacgtttcgtgatgacttcttgttgcagacgcgcagtaaaacggataaaaatccggatcgttttgtattgttttgttggtaagacatgaagattcacgccttctgccaattgatacaccatatttatatgctccttttcacagttgattgcccgcttactcttttaatgggtcaacctgccttttttacttattcctctgcttgaaatttataagttcaggcaattcgccgttttttctaaatgatgttacactttatagtatagcatagatgttttttatcaaaagaaacagacggctaaaagcgtatattgatttttttattttttattttt

SEQ ID NO: 1287 - DNA, 1616 bp, Enterococcus faecium
  marker
gcacagctgaaatgatagctcgatcgatcgtattgatcgaaataggaataatattttcatattggaccgcatctggtgtatataatgtacgttcacataatacccggtttgaggactgctgcgcatacttctttatatcagatatacttgaataaattgttggtgcaacttgaaaatcgaaagtagttacagcttccaaggcttcccgataaatcagataatgaacatccgaatttgtgacgatatagatagtcagatgttcttttgtcagacggagaattccgctcaattcgatcacaaaagcccgcatgcaattaggattcaaccgtagatcataaggtaactggctggaccagctggaaaaaattgtctggacttctttatataaatttgtctgttcctcatttaaaagataaaatttttctggcatgaataattgatagttatcccaagccgaacgcatcagatgaatcagcgcacgttcgaacggttggtttccgaataattcttgattgaagtgagattcaaaggtagcaactagttcttttatttcgggagtattgtcaataaacacttggtgtagctgttgaaagtcttccgcaatcaactgataagaatggaaaccataattacaaagattgaatagtgtcaaaataaaggcgaattcttcttttttataataggtttggaaatcagtgttttcccatgctgattcgacataattgtaaataggacgttttttgatttcttcgataaattttgaatctattgtcacagcacacacttgctggcgtaggaaactgatagcaaaaccaatcgataagatttctttattttctttatcataaaatctgccactattttccgttacggattcaatgaaacgatcggcacgttcaaaaaacgattcaggtagctcccaagaattaaaaccgcctaaacgatacgacacattaagaagcagcagacgtctttccatttcagtgaatcgaggggagtagcggtcgatttcgatcccgcagtcattaaaataagctaatacttgtttttttaatgaataagctttgctgacagagatgaattcacattcagttaattgaagataatcaggttcatcttcttccaaataaagcagacaagtttttaaaaacaacgaattttgagacaattgctgcatgatcttgcatcgaggtatatgttctgaaaaatataaagtgtaacggtccttttcccgatgtgtataagcgatctgttcttcaaattctttttttatgttattgatatcattgagtaaagtggttttgcaaacatgcaggagattggagagcttttctagattgacttctttatttacatagaattgcccacataaaaacagctgtcttaaaatatttttctcaatatattcttcaatcatagtagagcctccgccttgtatttttttgcacaatatgggaaatattatgacatgttttctttttgaaatcatcagttaatttctgaaaaagcatataaatgccgttaaaaaaggttttttatgttataaaatttggaaaacagataattctattaaaaaataaattgtgaatttttaacaatataaaaaaataaaaata

SEQ ID NO: 1288 - DNA, 1609 bp, Enterococcus faecium
  marker
catgatctactgggtacatggagatatttataaaaatgagcctttagcatttttgattgaagatagtcagatcaaagagcagatcgaaccatattttatggctcggatcgttgatgtaaaagaattccttcaacggtttccgtttgttggaacagctgatgcttttcatttcatcattgaagatcctgtcgctccttggaataatggtgtcttcgctttaacatgggatgaacagggacaagtccgtgtcttaaatgaacctataggaaaatccgttcgactggatatccaaacattgacttgcttgatgatgaattatcgccgtgcttcttatttggcaagaatcgaacggttagaaacagatgaagaaacactgaagtcactagagcgtatcattccaaacatggaagcttactttagcgattatttttgataaaaaggatgatgtttagatgaaaatttattttgccgcaccaatgtttgctaaaagtgatttgttatataaccaacagttagttaaagaaatcagagagctctcttctgagctttcgatctatcttcctcaagaaaatgaagcaatcaatgacaaaactgcttatgcagacagtcgaatgattgctcttgctgacacagaaaaagtgttggctagtgatttaatgattgctttactagatgggctgacgatcgatgccggggtagcatcggaaatcggtgtggcttatgcgaaaggcatcccagtgatcggcttatatactgatactcgacagcaaggcggaacccacccgaaaaaaatcgctgcactacaagaaacagctgaaaatcaatttcactacctgaacttatatacaataggtttgatcaaattgaacggaaaagtggtttcttcagaaattgagttgctttcagaagtaaaaagatttttagatggagggactttcagtgattaaagaaatcaaaaaggtgcaaatagctttacttgcttttggtgtattcgttgtctgctataatttttatgaatttatcacacaaaaatattcgacttctcaaggaatcacatttatcgtggaatctttattagggattgcattgattttcatgccacaagtcattttgaaagttttcaaacttaaaataccagcagcaatcgttttgttttactggtttttcttgttcatctctgtctttttaggcacagggatgcatttgatcagtatcatctctttttgggacaaaatcttacatgcggtgagtccaatggtcctgacagctcttggctatggattgattggttacttgatgaaagatgctgagatatcaaaaaccagtccttggttgttcctcttattcggctttgcgtttgctggactttgcggcgtgttttgggagttctgggaaattcttatgcgaccagttcttaggcatgaatcttcaacgttttgctgcttctgatggcacactgtttgtcggacgagcagcattgatggatacgatgggcgacttgctgacaaatacgataggtgctgccttaatgggattgtttgcatggtctcaaagtaaaaaagatgagcgttactttgaaagttataaattagaaaaagtgaaaaatacc

SEQ ID NO: 1289 - DNA, 1506 bp, Enterococcus faecium
  marker
aggggaacaaaaaagtgatgcggggaataacgccaaattattatatgaattgacagatgtgccggatgaaagaagaacagcacaattccattgtacgttagtattcgcggcacccaaaaaagacagccttgtagtagaagcggaatggcccggtcgagtagcccgtataccatctggcgaaaatggctttgggtatgatcctttatttatcccagaaggtaagaaacaaacagcagcagaattatcgagcgaagaaaaaaacaagatcagtcatcgggctcaagcaatgaaaaaattgagtgccgagtggaaacaatggctggaaggagagagatagatgcggtatttagtagtaagtgataatcatggagacagagatatcctcgttgacttagtagatcgttatcgttctgaagtggatatctttttccattgtggtgattcggaattagaagcttctgacccattatgggatacattccaagtggttcaaggtaattgtgattatggaccaggattcgaacagaaaaaagtgatccaaactggtcaggatacagtattcatgactcacggtcatttatcgaatgtccgatttggtttgacacagttagcaatcgaagctcgagctgcaactgccgatatggtgttttttggtcatacccatcaaataggctgtgagatggatcagaaaatcctgtttttgaatcctggtagcatttctcagcctagaggcccgatccaaataccatcatatgctcttatcgaaagtttagatgaccaaatttctgttcaatactataaccgtgcccatcaggcagttgaagagttggccttttctttttcgagagagcgctgaataaaaaaactctaatttttaataaaaataagctttattttatgaattttgcatccggtttcggtaaaatagtagtgttgaatgaaatagaaatggaggccatcagatgattggacctatagtaagagaaatgctgctggaaaatcaggaaacgtttttgattcctgcagaaaatgtggcaaatgttatgtatcatcatccattgtcccatggtttacttgtgttatcgaaggtcggttattccaaaattcctgtattaggaaaagatgatcactttgtaggactagtaagtttatcagatgtggtcaataaaatgattgacttgcaaacaatcagcatggacccgttagaaggactaacggttgctgatgtgacagaaacagatgttccgacaattgatgaaaattgggaactagaagaagtactccatttgttagtcgattcgccttttttaccggttgtcacagaagatcggattttcaaaggaatcattacaagaaaagagctgcttaaagccgtaaacttcatggtgcatgaattagaacgtcgtaatatattgtctccgaaaatcgaagaattaaaagaacaaatcgatatcgtgagctaaagaacgagaaactaaaagataatcaaaaaataagtagaaaaaa

SEQ ID NO: 1290 - DNA, 1317 bp, Enterococcus faecium
  marker
agcaaaattgtttgcaagcttttccttacatccatattatgcactgattcagtaaaaatgtcataggacttaagttgtaacttttactccatcttgagttgttctttcttttttgtaaagagatatgctgtagtcacgcaggttaaaggaagaacaagtagtgcggacaatgtggtaagaatagccatcgtatattctagaacaaatgatttttcattgatcacttgctgaaaaggaatgtctaaatcaataaaccagaggatcaacgctaaagaacttcccatgaatgcaaaaagaagtgtcattactgttgacgccaatatttttttagcaatagcgaaactagaatggcgcaattggtaaaaagataattgcggatttgcctgatatacttcgaatgtcccactagaaattgctacactcgcatctaaaacagcaccactaagactaatcagaagcaacgatctcgtaagtaatctaaaatcaatcgctaaagtcttatctaagccagataattcttctagttctaccgatgtaaaaccttggatcgctaaaaaatcagtgataggaagcaatagtaggaaacaaaataaaaagatcagtatactcacaaaagctgcacgcatttttagattataaccgttgataaaaaataagataaccacagcaatcaataaaaatcctatgaccgacaatgccagtatcggccacttctgatgataaccgaataacaacaggaaaaagatccctaaattgatgaataagcctaaaagaatatacataccttgcgtaccgccaataagtagcacgctgattgctaaaatcccaacaagtataataagtacattcatcgtttcagcctccttacagtcagaaaaaagaggaccgagatagggatcgataatactattcctaagctgccagcaatgacgcgtaaaaattccaatgataaatgctgttctatcgtttctttgaacgaccattgatttcctaaatataaaagaagcgatggaactgacccactgatatagacgaacaaaaggatattggtcatcgagccaatcacatctcgacccacttgccttcctgaaagccataactgtttcgctgttatttctggttgtcgcttagtcaattcttctaatgtcgcaatgactgtgataacggtatcgagtgttcctccagctgttccaatcagtacgctagaaagaaaaacagaacgatacggtcgtgtcagataattcagttcctcatagcgcagtccttggtctttccaatgattcattgtcaaaagacaaataaaaaatgctaaaaaaa

SEQ ID NO: 1291 - DNA, 1277 bp, Enterococcus faecium
  marker
aactgctttttttgtcatataaaatcccccttttttctcatcataccttgatttccaaaaggaggataacgttttgcttgtgacagaaaaaacggaaactattatatacgtgatacggcttctgataaatgccaaaacgaacgtacttgatcaaaaacggttaaatcaggaatcacatattcagcagaaggaagatttatgttttcacctattcccaatacatgcatgttaccagccaaagctgcttgacaaccagcttctgaatcttcaatgaccaagcatgcatttggcggtacattcaattgctgtgctcctttgagaaaaacttctggatcaggttttgcttttgatacttgcgtgccgtcaataaggacatcaaaataacttgtcaaattcgttttttctaaaatgaggcgtgcatttttgcttgctgatcccaatccgatcttgatgtttgtttttttcaagtactcaagaacagctattgcaccaggcaaaacggatgtttcatccattttttgaatcgcttgaagatatagattgtttttttgctcagcaaaggctgatttctctttttctgagaatttctgttccatttttccaaatgacagcaatcgctctagtgactcggttctggatattcctttcagttgctcgttttctttctcagtgaatggaatggacagctggttagctaaaaccagccacgcttcgtaatgataacgagctgtgtctacaagaacgccatctaaatcgaatagtgctgctttgattttcatcgattacctccttgaaaatgaacgacttgaagtaaagatgcgatgtttttagctgtgcgatgaagattatcagtggcttgctgtaaagcttcttgtaaaggcacagctgcaggaaggatcggaaaaacggccgaaatgccaacatctgctgctttttcgcttcctttaccaacacttccgcaaatagctatcacaggaacgccctctggtactcttctagcaatcccaactggcgcttttccttttagactttgtccatctagacgtccttcgcctacgattacgaggtctgcttgctgtacccgtttatcgaactccagtaaatccaatacgtagtcgatgccagagactattttccctgaagcaaatgctaacagtcctgcacccattccaccaccagcactactgcccgatgcctcgattacttgaggggcaaatctcatataaaaatcatgcatggcttggtcagccactgctaattcattttctttcaagcct

SEQ ID NO: 1292 - DNA, 1251 bp, Enterococcus faecium
  marker
gctggataccatgtttccccaatttttatttccgacacataaacaccttctttaggcaaatgaaccgtgctctttactttgacatttgctgtagggaatcctagtagtctgcctcgtgcatcgccatggacaactaccccttctacctcatatgtgcaacctaatagttttgctgcttcttttacttgtccgctgtctagtaatccacgaatacgggtagagctgattttttcaccttgttcttcttctttagaaactgtgacgattttgaatcttcctttggcatattcaggaaaatgagcgacatctgcaatgtcttttggtccatacgtataatcaaaaccggaaacagcatattttgcatgtaaccctacgatgtattgatcaacaaattcctgcggtgctaaatgagcaaaagaagaagtaaaatcaacttcatataaataatctatacccaaagcggccattttttcttctttttgcttaaggctagtcaaatatttcacgctgctaggatcgatctttttaaagacaatagatggatgctgattgaaagtcatcaatgctaatttcaatccttctttttgtgcaatttccatacctgtctttatgactttctggtgtccgatatgcacgccgtcgaaaaatcccagcactaaaacgacatcgtcttctggaatttgttctgattggtaaggatgtctgatcttgatgatattcattcgttattcctcatttctcaatactttactaggttttaatttgtttttttctttcgggtttggctgataaatactgacaacttttcctttataaaacaaagcaatttcttctgacggcatttctgggagcgcaaatacagtataatcaagtctcataccgttttttactttctgccatacttcatcagtaatatctactcgtttgaaccgttccactcctttttctattggcagcaaacaatcatcgattgtcccatttttcacagcttgagctacttcttctaatgtcagagcatccttctgggacataccggcacttgctgttcgggtcagatcagacatgtgcgcagggtaaccaagtttcttgcctgtatctacagctaatgtgcggacataggttcctttcccgcattctacttcgaagcgccaagaaatggttcctgtcacttcgtctcttgtcaattcacttgtccggataaaacggtaaatctgagcctttctaacaggacgctccactgtttcattattg

SEQ ID NO: 1293 - DNA, 1233 bp, Enterococcus faecium
  marker
gtccgtttctcgtatatcgttattggaggtcatgttgctggtacctcattagctgaaaaaacaaaacagttgtaccaaggaagtgaagtagtaaaagcaaaaagaggaacgatttatgatcgtaacggtgtggcgctcgcagaagatgcctcctcttattcaattaaagcgatactctcaaaaacatatacctctggggataaaaaactgtatgttgaagaaaagaattttgataaaatagcagaaatcctgcataagaatctttctatagacaaaaaagatgcactgaatattttagaggacggcgcaaaaaaagagctgtatcaagttgaatttggtagctatgggaaaaatatctcccaagaaaccaagcaaaacatcgaagcggacatgaaaaaagaaggtgtcgctggtctttattttgtcgaccatcaggctcggatgtatccaaatggcgtcttttcttctcattttattggatacgcagttccagacaaagatgagaatggcttagttggtaaactaggtttggagtctgcttacaatgatatcttgagcggtaaagatggtaagattatttatcaaaaagataattttcaaaatcctctgccaggtacagtggcagaagaagaaaaagctgtcgacggacaagatatctacacgactttagacagcagactacaaagttatttagaaacactgatggatcaagtaaatgaagaatatcagccagaagaattgacagcagtcctgatgaaagcaaaaaccggagaaatcttggcaatgggacaacgacctactttcaatcctgaaacaatggaaggattgactggaaaagatgctatctggcgtaatttcttggtacaagatagttatgaaccaggatcaaccatgaaagttttcactactgcagctgctatcgaagaaggagaattcaacgagaatgaaaccttccaatctggaaaaatccaagtagaagatgctacgatcaatgaccatgactttggtgaaaaaggtgtgctgaccatgcgtcaagctctttcatggtcaagtaacgtcgggatggtcatactggaacagcgattaggcggacgatggtataactatttacaaaaactgggatttggacaaagtactcattctggattagatgatgaagtaaacggtgctttacctacatcaaatattgtcgaccgagcaatgagtgcttatggacaagcggtaggtgtgacg

SEQ ID NO: 1294 - DNA, 1116 bp, Enterococcus faecium
  marker
ctgtgattagaatcttcatttatggtcacctacatttactagtgttcttccttggtgtgttccagcaagtagtttagatgctgtttcaggcaattgatccagagtaatctcttggacgaccagttcatctgcaatctgcaaatccgccatctgttgccataaagaaagacgttgatctattggtacattgacagaatcaattccaatcaactggatgtttcgcagaataaaaggcaagacagtcgcgtttagtttgattcccccagcattgccacataaagctactgcaccgttataagagatcaatggaagaagactgcttagctgctcgccacctactgtgtcgatgacatagtcgatttgctgttttcctaaagcttttgttgtctctggcagaaattcatcaggtcgtacgacttgcaaagcacctagactttttagccatgtgacagactcttcttttctggaaaaggcaatgattgactggaatcctagtttatgtaacagggctatcgctgtactgcctacaccgccagaagcaccagtaacgacaacttttttatcggaggtcataccttgacggattaaagcgttcacacacaacatagcagtaaaccctgctgtaccaaggatcatcgcttgacgcagcgtcatattttttggtagaggaactaaccagtctcctggtactttttgatattggctataaccgcctggatgggtgacgccaagcccaaaaccagtagcaagtacaagatcttcttttgaaaaacgtggattgttactttggacgacagttccggataaatcaatccctggagtcatcggatatgttcgtatcacctgaccagactcgctcattgccaatgcatctttataattgacatcagaataggcaatttttaccaagacttcattttcagccaactcagtaaatggcagatcactgattgctgtatggaaaacaggttcctttattacctgaaaagatcgaaaagcgttcattcgtgagacactccttttaaaaattttcttttatcataccataaagcctactcttttattcttgttcttccgtaaatttagacaaaaattaggtgaaaaaaaaaaaaaaaa

SEQ ID NO: 1295 - DNA, 1108 bp, Enterococcus faecium
  marker
tatctagcgtccattcttttagctattacattcaacacgctcctcattatcttataaacgattgaaaatttcaaccaaatttatttggaaaggaggattcgcttgctaaaatggtcaagtacgagaaaaatccgtttttattgactctttaattctggtgtaagaagaccaaacttcctctgatatatcaatgtgaggaataaaatcttttcctttcggaccatagccgttctcatcgtcatggagacgttccatttctcctaatactagcgcatggaaatattccttaggccattgatgattcagttcttttgctgtaaagatgatctcttcagaaaagtgaaggatttccggcacaaatggcacagcattcgcgaaaatagtttgttcattttgccatactttctcaaaagttgctcgagtcctgcgttgcagtgtcggatcattcatcaataagattttttctggtacagctcctaaggaatgaagaatctccagtgaaaaagtggcgttctctccagaatttgtagacttcgattctatcagaaaagccttatcgggcaaatcatagacttcttttagatactgacgacagatttcactttcactcatgccatcttcaaaatgaaatccttgcttttcaaaattctcataaaggattctagtcgcatgccccacccctccgaccaaaaacaattgatctacttggccatttaaatacatttgtgctgctttatcagctaagataggaagacagtttccagctaaaataagtgtaggtgccgtcagttcctcaaaatttccctcttcaggtgcggctaaaaaatttaatagctgattccagtcttttagattcctctgctcacttttttccaaaggccttctatcctttcatctgattttttgtgcttcattaaagtcttctctttttgtctcaatccatttgatttctccatgacatcttccacaacgatatttgcgtacatcgattcttctcttgcggcagatcgtggcagaacaatcttggcatcgataatactccatctttatctgtttcttcgtcaaggctggtgcatagcgcaaccctcctgtttttttcaaaagatac

SEQ ID NO: 1296 - DNA, 1108 bp, Enterococcus faecium
  marker
tacagtagaaagcgagggcgttacatatttcgctacactgacatcattgaagcccatcacagaaatatcttctggtaccactaaacctttttcttgaatcgctttcagtgcgccaatcgctaatgcatcattagctgcaaaaagcgcatcaggaacatgcggattcgtttttaaatattgcttcactgcttgatatcctgactcgacagaaaaatctgcttcgataattggaccttcgtcgtagcctttttctgccaaaacttgttgaaatgccataattctgggatcttttagccgctgatggtttttcttcgtatattctgttccagcaagcatagcgatatgttgcgctttatgggagacaaagtgttcaatgactttttgaacacttgacttaaagtcgacaactagagagtcgattccttgagaagtgccgtcagaatctaccaaaagcaaggcattttgggatcctttcatttctaataactgagcttcgtcgaattttcctagtgcgatcgttccatctgccggaagatcactaatggaatcccacgtttctttcaataaagtaacgtttgcttcttctgcctttttttcgattcctaggcgaatagataaataataaagatcttcaagctcttccgtatcgtcgtaccactggatcaggcgaagcgtttgcttagtatttgctgcatttttacgatgtttcgtataatttaagcgttctgctgcttcaaaaattttttgctttgtggctaagccaacggaaagatcaggatcatagttgagaactcttgaaacagtagcaggagaaactcctgccaactgcgcaatgtctttaattgttgccatttgtctctcctccattttttacgtttataaaatcgcagtaaatcgttcaaacgctgcctgtcctttttcatctcgcttgaatactccagcgtcttccagtacacgtgcaaaaacctgacctacagatttttgtacgacatcggtgaccgtatctttcgtcaaatcaggatgttctttttttaattgttctgcccacggacgatgatattcagccatctggttttcttctcctaataagaaatgctctacttctact

SEQ ID NO: 1297 - DNA, 1079 bp, Enterococcus faecium
  marker
gattagaacttgcgaaaataaaccggttaaagtgtgtctagcgcaagagatttgctataatagacgataagggtaaaatgtaacgagaaggggttgaaaaatgtgtatcaaattgtaacagattcttgttgtgatctgccataccatgtattagcaaaagaaaaagttgattttttatcaatgaatctccaattgaatgatcaagagttagtagatgacctcggaaagacattcaattatgaccgctacatgaatcagctgaaaaatggtgcgatgcctacgacatcacaaatcaatgttggccgatatttagaatttttccgttcttatgcggaaaaacagattcctgttttatatgtggctttttccagtggattaagcggctcttacagtagtgcgcttcaagcggttgaattgctgaaggaagaatatgaagaccctgagatctatgtttttgatacaaaagctgcaagtattggggaagggcttttagtattggaagctgtaagattgaaaaaagaaggtaaaagcatcgaagaaaccctagagtggctggaaagtaattatttgaaagtccattcatgggtaacagtagacgatctgaaatatctagaacgaggcggtaggatttccaaagcaagtgctactcttggcagtctattgagtgtaaagcctattattacggtggataaagaaggaaggctgacgaatgttgacaaagttcgaggaagaaacaagtcgatccagacaatcgtcaatgagacggtaaaaacaatcgttgcaccacttgatcaaatcgtttatgtggcttacgctggggatctagagagcgcggagaaggcaaaacggcttttggaagagcagataaagatgaaagatgtgaagctttatcccttaggaccaacgatcgccagtcacacaggctatggctgtatcgcgattttttcgatgggaatcagtcgataaaagcagtaactcattctgtaaaaaagcccagaaattgattgtaacaaaaacagcgactcttaaaagatagatgagcatcctatctcttagaggtcgctgtttttttatttttt

SEQ ID NO: 1298 - DNA, 1066 bp, Enterococcus faecium
  marker
caagtattcagtcaacttatatccccatttcttttttgtctgttttattttagcatgtgtgaagaggcaattctagttttcttttaaggtattaagccaaaattatgcaaaaatgcggcgtgctatttttgattacttcctgtgacttggagttaaatgatgggctcagatcagcgcgctgatttcacaacctcttcatagaaactgccatcttcaacgcagacataggatcttgatgagtgatcgtataggcatttttcggttcttgccagcttacttctacggctcgattcgtcgtatcacccatatcaacagtaattttaccaaattgttcaggtgctggtagactgttttcttccaaataagctacgatttctttagctaatagtaagggatcttggccttctatattattcccacggattcgaatacgccagtttccttcttgccattcaagaaaacttgaacctgctgcaccttgctgataccctgtgattcgagaacctaagtccacttgctgaccatttgtgtcgatctcaaatggctgcaaaacttggattgtttcttgactagaagcaaacccatattgatatagataggttgcaataggcgtttcttgattcaattcgtcagcattcaacccgaggggacgatctgttctgtaatataaaatagaataaccttgctttgtatgtgtcgctgcgatattgagatagcctgaagagactggtacatctagaggcatgggaacatttggctgttgttctttcaactggtctaaagcagtctttttctcattatttgaggtagccattgtttgttcagtggtggaagccgttttggtactacttttttctggactggtaacagtttcagatatactgcttgatagatgtgtattgtctgattcttgagtaaccgaactacaagcgcttaacaatagagcaaatggaataaataacattttctttctcattggctgttcactccctcctcctataaggatacgctttcttgcttgttttgccaaataatcatttcttcaattaataaaaaaaacaaaaaa

SEQ ID NO: 1299 - DNA, 1060 bp, Enterococcus faecium
  marker
gaaaatgttcaactgatcgattctggagcagaaacagtaggtgaagtatctatgctgttagattatttcaatctgagcaattcaccgcaaaatggtcggacattatgccagttttatacaactggctctgccaaacttttcgaggaaatagctgaagactggcttggaatcggacacttaaatgtagaacatatcgaattgggaggaaaataaggatgcgtcatgacgggagaaaagctcaagagcttcgcaaactggagcttcaaacaaatgttttcaaatatccagaaggatcggtagtgatccgttttggtgatacaacagttatttgttctgcaacaatagaagattctgtacctccctttttgagagaaacaggaacagggtgggtgacagcagaatatagtatgctgcctcgagcaacgagtacgagaaatcgtagagaaagcagcaaaggaaaactttctggtagaacaatggaaatccagcgtcttattggtcgttccttgcgtgcagtagtagacttggaaaaattaggagaacgtagtatcatcgtagactgcgatgtgatccaagcggatggcggtactagaacagcaagtatcactggggcattcgtggcattgaaattagccattgaaaaacttttaagagaaaaagaattgtcagaagatccaatcaaagaacatcttgctgcagttagcgtaggaatcttaccagatgggacttgcgtcacagatttggattaccaagaagattccgcagcacttgtagacatgaatcttgtaatgacagaatctggaaaattcgtggagattcaaggaactggagaagaagcaacgtttgatggtgaacagttgaatgaaatgctcttttttggaaaaaacgcgattgaagatttgatcaaagagcaaaaacatgctttgctaacagagtttgctcaaaatgatgagcggatagaagaaacaaaaacaatcatcattgcgacaagaaatccaggaaaagcagaagagtttcgaaatatgttcaaagaagcgggatatcatgtaaaaacattact

SEQ ID NO: 1300 - DNA, 1028 bp, Enterococcus faecium
  marker
gataactctttttttaatctgttagcactcttaaccttcgagtgctaacctacatttttaataatactcattctccctcttttttgcaagcttttaaatcaaagaaaagaaattttattctgacagctgcttattgaaattatgatataattgaaatcaatcgatataagcttgccttgcatgcttgttatcccttaaaaggaggaattacatgtctttaaaaaaatatagcttcctcagcattttttgctatggtctaatttttatctcacccttgatcctagcttcgataggacttgtaaaatctacgtctgaattgatcacagcaactgcagtcatgtatatactaggcgccgttgtcctagctattttttattttaagcaacgtgaacccttagcgatcgaatcagcggtaaaaaaagcttctgctccaaagattgttatttatggattggttggaatctttgtcgcattgattctgcaaagcatcgctgtcatgttagaatctgtattgtttggcaaagcaaccccttccgagaatacacaaaatatcatccagatgatcatggaagcacccgcttttattttggcgacaactgttgctggacccatcatggaagagttcgtattccgccgcagtatactggggatcatcagtcgatattcaaatttttgggtcggagcagtgatcagctctttgctgtttgcgtttgctcataatgatggtcatctgctaatctactttttcctaggtttcttcttcagcctagagtacaaagcaactggtcggatctggacatcgatgatcacacacgtaggaatgaacacattagttgttcttgttcaattagctgtccaaaaagggctagtataaacatgactataaatactcctgtcatcctagattggtgattttcccaatctaaagcgacaggagtatttttgattttttagtcgttcatcttttctgctgctccatcattttttgtctgtctttcctttttgcagtttgcagaatctattttttt

SEQ ID NO: 1301 - DNA, 995 bp, Enterococcus faecium
  marker
tcccactggaagcgccattgcgactgttgaaagaagatcgtctgcaatgccgtttgctagcttgccgataatgtttgctgtagcaggcgcgatgagaaacaagtcagcttgttttgctagttcgatatgattgattacctgcggatttgattcttgcatgacgtctgtatggactgcgcgcttcgacagagattgcaaggttaatggcgtgataaaatgtgtgctgcttttagacataatcacatctacctgggcacctaatttgacgaattgacttgtaagatcagcgcttttgtaagcagaaatacttccagtaacgcctagtaagatctttttcattttgattcctccagtctaattttctcagtaatcaatgcagcaatctcagatttactttgagcttcttccactgttccatctttagataagagatagccgtggtgtgtctcgccatggatttccgtcaaatcatttgcgaaaataaaatcagttttgttatttatcagactattttttgcgactgccagaagagattcctttggtacatctactaatagtttgaaaccaatgatttttgcttttggctgccattcacgtagataagaaatgatttttggtgttttcttcaaaacgagcacaagatgctcggtgttagaagagatctttgaaacagtggtatctgtctgttcattttccgcaaaccaattgtccagttcttcttgcgttgaagaagtgggtaggttttttgccagctgttcttctgaaaaactaaaagcaggagtaaaatcactgactgccatactgtggataatcgcatcgtagtgttcttttttcgttagttcttctaattgtaaaaataagtccagtgcagattcgatcgtataaatcgttatattggagtgtcttttcggtttcagtgcttgtttcgtagtcacgtaatcgattgtggtatccggattggcagctaaataatcagctaatgcttgccctaatcg

SEQ ID NO: 1302 - DNA, 989 bp, Enterococcus faecium
  marker
ttgatcgccagtgaaacattcaataccttcgatacgtatatcatcgttgggttattttacttagttatcacgctaccgttatcttacttaatggtttatcttgagaaaaaatgggcggttcgttcatagaaggaggggaaatacatggattttagcggcgctttttcatggatgaatatccgttttttattggaaggattaaaggttactgttgaagtttcattgttttcgatcatttttagtttcttgatcggtggtctggcaggtgtgattcgttttgcgaatatccctttcttttccaaaatccttggtgtagtgattgatattatacggaatcttccattattattgatcattttcttcacttactttgccttacctcaaatcggcattcagatgaacatcttctggtccgctgttgcagcattaacgatttttgagtcagctatgttgtcggaaattttccgagctggactcaatgctgttccaaaaggacagatggaagcaggattatcaacgggactgacttatgtagaaacgatgcgaacgatcgtgttaccgcaagcatttaaatcaatgatcccggcaattgtgagccaattgatttcactgatcaaagatacttcattagcagtaatcatttctttacctgaactttctcatcaggcacgtattatttatggacagaacaccaattatgtgcttccgatgttcatcatcatgacacttatgtacttcgtggtatgttacgcgctttctctgctttccggttacttggaaaagagacggtacagttattaatagatgattcttttagcggttgtggcaaactaaagtcacaaccgcttttcctctttccattcgaaaaaaagagatttcgattgttttaagcaagtaagagcacttgaaaattcacgctaaaaagtacacaatagggaggatagaatttattgaaaaaaaggatgatacgattgacagataatcgccct

SEQ ID NO: 1303 - DNA, 950 bp, Enterococcus faecium
  marker
atgcttttccgtttgctttgatcggtgactcccctttttttacttttactggcgtgtgcccattgatgattgctgaaccttcttcttttgcatcgaattctgccaaaattttttcactgaaccactcttcatctcgcaagtgataatagggattgcttttttcgacgtgcgtatgaggctctgtgagaaaatagcgctcaaaagtcgccattttactcttgccgaataaaggcgaaaatggcccgctccacgcataccaaatcaaatcggtcgctaaatcttcttttgcagtcagatcttttgcgctttcagttatctgtttttcaaaaaatcccagcagttcttttccgcgataagattggtctaattcaaatgctaagagctgccccttttcatctacaggtatacagccatgaaacagtacatgctgattgttcgtgagatacattccccctttttcgatcaaaaacgtcatgtgtttttgcattcttaacgagtgctggaatgaatacatcaaactatcgatcactttttgttcctcttccaagaattttttaggatcatctggctggatcgtttgaaaacaagtccctttcaactcatagagctgaccttctaaatcgatcgttgattcctcatagttgattttttccaacaatttacgatcgtccattttaaattcaggtcgtcgatccaacaactgatgttctgatttgaattggaggatagaaagtgcttgatggattttttctaattcttcttgctctctttcagatagatctttcctgtttttaggcgtaaatactggattcttctgataggtttgatgggcaaaagaaaataatggacgtaaatttaatccatattctttctctaattcaaataaatagttgtagcgtgcggcaatccgtaaaagcgtcaataaacatgcctcagagccgcaatacgca

SEQ ID NO: 1304 - DNA, 846 bp, Enterococcus faecium
  marker
  misc_feature (378)..(421): n = a or g or c or t
gtggtggatccccaaactggagaagagcgaacaactcaaacagaagttctagggcaacctttttcaaaagaaacaacagaaaaagtccgtgaatatatgagagatgttgtcgaaagcgaaaactacggtagtgcttatggtgtatatagtgtacctggatacaatgtatcggcaaaaaccggaacagcccaaatcgcttctgatacagggggatatcaaacaggagatacagcctacctgtattcgattgtggagatggttccttctgaagatccagactatgtcttgtatctaacaatgaaacaccctaagacatatgatcgaatggcattggctaaaatcgcaaatccattgatgaaacgggcaatggattttaannnnnnnnnnnnnnnnnnnnnnnnnnnnnnnnnnnnnnnnnnnntatccgtagccgattatcgtaatcttgaagcggacgttgcagcagctgatgctcaaaaaagtggactgcaacctgtagtgatcggtaatggtaaaaaagtacaaaaacaatctactgccaacggtgatcagttgatctctggagaaaaactgatcctatatactggtggtgataagctgatgcctgacgtaacaggatggtcaaaagcagatatcatgaagctggggaaaatcctcggtattgaagttagttttgatggagatggttattgtgtcaaacaagaacttgctccatatgaaaaaatcactgaagacaaacttagttttactttagaagaataagaagagaaataggagagaaaagagcatggaatggacacaagcattgattcccattgtcagcagttgtgcaatgacaattgccgc

SEQ ID NO: 1305 - DNA, 817 bp, Enterococcus faecium
  marker
cactaaggtacgccagcctgctgtcccggtgaatttttctgcctttgacatgatccagttgatcgaacagttagcagctgattttgagttggaagcttctaaaaaaaatatccaaatacttgttcaatcaaaagtagactcccttatcatggatggcgataccgaaaaacttgtacgtgtcttcaataatcttttgacgaatgcgttgaaatacggaaaaggagcaacgaagatcgtaatcgaagtagaacgtatcggttcagaagttgttgcaacagtcaaaaataacggagcaatgatcccacaacaggcaatcgataatctattcgaccgtttttatcgtgtagaagaatctcgttcacaagcaactggaggaactggacttggtttagcaatcgctcaaagcattgtggctttgcacggcggatacatttatgcaaaatcagataagcaatggacttctttcatcatgcaccttccaatcaagaaaaatgaaaaattacctattgatacacaggaagttattgacgaaagctgaaatattcgctattcttattacaattattagaataaatgaaaaacacagaacccagtacactttattctttttcagagagctgatggcaggtgtaaatcagcaaaggataatttggaagttccagttcgtttacgtgccctttcgaaataagaaaggtcggttcaacagccgttatgtgttcaacaagtgcagctgacgctgaacttgggtggtaccgcgaatttcagactgattcgtcccaagaataatgggatggatcagtctttttttattttcaaa

SEQ ID NO: 1306 - DNA, 707 bp, Enterococcus faecium
  marker
gttggggaaagtcgtagaagaaggagacgtattgactgtcttcagacaaccgaaaaaagaagtaaccaaacgctttgtacaacaagacatcgaaccagaagctgattcgacagaactattagctgaactcatcaaagaaaatccaagcggccgtttggcaacatttgacctttagcgaaagaaatgccaacgagccagtcatttcccaagcgattcgaacgctaataacatcgatgtcaacgttgtgtatggaaagatcaaacaagtgaaagaaggttcctttggttcattgactgtcttgatgactggtgaaaccaaagaattagatcaagcagaagtgttcatcaaagaacaaggagtaggaattgaggtgatccatcgtggataaaagcttttcagaaacatatctagattttaaacaaatcaacccggaaacgatgaatcaggctatccttgatacactatatatgacattaatctcaatggtcttagtgacgatcatcggattagttttgggattgatcctttactctattggacgcaaaaacaaaccgtatgctcgaatcatttatggaatcgtatcgatcatcagtaatattttccggtcaacgccatttatgatcctgatggttttgatcattccatttactaaagcaatcgtaggcactatgctaggtgcgcaagcagccattccagctcttgtttta

SEQ ID NO: 1307 - DNA, 677 bp, Enterococcus faecium
  marker
atgacagtgattttggctttaatcagctcaataggcacgttcgttttatcaactgtagcaattttacctagattttctcccagtgcttctactttttgattatcttgatcgtaaaaagcataacctagaccttctgccatgccgatgccgccatcgttggtactacttccgccaacgccgatgatgatgtgtcgaacaccttgttgcaacaattgtcgtatcagttctcctactcctcgcgtggataacctaagtggctgttgttggtttagtgggacatctttcaatccgacgatttctgccatttcaaaaatcgcagtttgaccgtctgaagcgtactggatttctttgtttttgccaaatgcattagtaacgactgctgtttgccgcttcaaccttaaactgtctgctaatgatgaaaccgttccttctcctccatcgcctataggtagcagatcatattcagcctgaacaaaaacttcttgaaaacctgattgaatggcttgtgctgcctctaaggctgtcagactttctttgaaagaatctggcgcaatcagaatacgcattattttcccctccgttccaagatcagttctttttccagctggtattggtctccattgacaaaaataggtaatgtttctttcgtctctttttttattactatttgttttttt

SEQ ID NO: 1308 - DNA, 666 bp, Enterococcus faecium
  marker
gatttcacgcgtaggatccccgagatcttcaattcatcagaagcattctgatacatcgcatcataatctgtattagggataaaattcccagttggaagttttgtatagtaagtattgttgtttactaatttgaatgttgtaccaacgatatcatcaaaatcaagtttttcgtcttctttcacatcaaatccaagattcttcaatgcgttgatattagtattattattgccgtctacgatcagcacgacatctgttgctgaggctggataacttccggcaagtaaagaataattgtcttttaaaaagttttctttgctagtgtcaagctgtgtagggaaacttgacactcccacacctgtcattgctgacatcgtactagataaagaaagagattccgtatcaggattttgattcgagaagctgacaggctgtactttgccatttacatcacgtaaaagattgattcctgtagtacgggtaaatccgatattattacttaagttaggatcgatgtctgttacgtaatcgacgtatgtttgatcaatcttattcgtgtgctgtgctttatcttcttcgctgacttttgcagtaatcgttttgctgtctggataatccgctttgcttgcacccaatccggcatcgtcacgagtctggttagtcgttacc

SEQ ID NO: 1309 - DNA, 641 bp, Enterococcus faecium
  marker
aagcgtaagggggagcaagaatgaaagaaaaaaactggctcgattatcttgacgcggtaaatgatttttctttaagtaaaggcgaacctgattggatgagaaccttccgtcaagacgcactagcgaaagcagatgaactgccattgccgcatatcgatcgggtgaaattccatcgctggtcgttatttgatgtgaaagaaacacaaaccatcagtgaaacaggcacgattccggcatttgatgcaatgaaagacaatcctgtgcttgtccaacaaggttcatggacgatttttgaacaactgcctgtggaattagcagaaaaaggagtcatttttaccgacttgttcactgcaatgatcgaatatccagaactagtccaagaatattatatgaaaaaagcagtaaacatgaacgaagaccaattgactgcactccatgtagcttttatgaacagcggtattttcctgtatgtgcctaaaaatgtcgtgatcgatgaaccactcgagtccttattcattcaagatggcgcatccgatgagcacttcttcaagcatgtgttgatcgtggcagatgaacatagtgaattttcttatctggaacgtttccagacaaccaaagaacaagtagcaaaatcatcaggt

SEQ ID NO: 1310 - DNA, 626 bp, Enterococcus faecium
  marker
caaaaaaaatgaaaggatgacaactgatgaagtattctctgcaatttagtgatgcaatccatgtacttgcctatattgaaatgtttcaagatacccgatcactttctagtgagatgattgccagtagtatcgaaacaaatgcagcaaatgtacgtaaaatcatgagtcagctcaaaaaatccggtttgatctttacaaaaaccggaaaaccgcagccttcccttgccaaaagtccagatcagatttctttactagatgtctatcgcagcatcgaaggtaatacacagcttatccaagtcgatccaaaaacaaatccaaattgcgtcgttggtgcgaatatccaagaagctttagaagaaagctacgctcggctgcagaaaaaggcagaagaagaaatggctaagatcacacttgatagtctgatacataaaatagccgttttggaaaaagaaaaaagaccagaaaacacaggcctcgtagagagatttttataattctctctactgtgcctgcatttttctgatcggaatcgtctacataaattcttttattctccgggggacaaaagccttgtcatgcccctttttcctctctaatgctcaggtcaaagcgctgaagtcatgacg

SEQ ID NO: 1311 - DNA, 598 bp, Enterococcus faecium
  marker
atattatcatggtttattgactaccggtatccagatttctcccatatatttcccgttggtaactcccatttcgactacagcatttggacccccaacataggcgtaatcttctacttctcttaaaacatgcccaaaggccgtattcgtcaaatcatttcttaattcttcaggcgattctgctaaagcgcttacaacaagatacgttccttttgggaatgggatgattcgcgtagtgtttggaacatcctgactcgtttgaacaccgacatagtacatcattttcccgttatagggttcgttgactgtaaagaaataatgattttcagcagcttgtttcaatgcatctattgttccattaccgataactttttgctcaaatgcttgtttctctgcagccaaaccgacaaaatccgtattgctactcttcaattccacaccaatacccgtcaccgtaaaatctggtttttcttcgatcctatactttgccatttctcccaccctttctattatattaagttcatcttacataaaattaaagggaaatgacacgattacgctcttttttctagggatatttttattttttaactattttttt

SEQ ID NO: 1312 - DNA, 587 bp, Enterococcus faecium
  marker
agccctggtgtactggaagcagcagatgcaatgggagcaagttactgggaaatcatctggaaggtcttgatacctgaaagtattcccgcattgatttctggattaacagttacaacgatctcgatgatcggatttactgcgatggccggcgcgatcggcgcaggtggacttggaggtcttgcttggcaggaaggctaccagcgtggtaatctaacagtgacattcgttgcgactttaattattttactaatcgtatttatcgttcaaggaatcggtgatttcttaactaagaaaacagacaaaagataataggatatagggggatgtaggatatgaaaaagaaaatttttggatttgcagcagcgcttttgctgactgtaggattagcagcatgcggtaacaacagcgacagcaaagattcagcaaataaagcagacgacacgacattgaaagtcggcgcttcaccgacaccgcacgcagagattttggaacatgtgaaaccattattgaaagatgaaggaatcgatcttgaaatcgtcaaattcgatgactatgtattaccgaaccaatctttggaagaaggcgac

SEQ ID NO: 1313 - DNA, 584 bp, Enterococcus faecium
  marker
actgtccgtcatgtgcagcagtcgcgtattcgcatgctttctcaacaaatgctacatgttcgggacccatgtattgactaacgagctttatgacaccgggtcccgttaaaatttcttcttttgtcacaggaatcgatccccctttcttttttcggtaaaacgggaatcgggacaaatatctgtttgataattgtcccaaaatccgtgcagttatacgtttttttacggaaatgttcgctttttaaaagctttttcaaacgatttttcgtatccattgtataaataattgtttctattatacaaattgttgactattttttcaattctttctgtcgatactcttttattaatgaagaacgttagctgaaagaaggattcattaattcccattgatagctagcagcacttaataaataaagaggtgctgtttctgtacgaaggattcttggtcctaatccacaaagtatccctttgtgttctacaaaataatcgacttcatcgcgggataatccaccttctggtccaaagacagctaagattcgactatctggttttgtttcactaagaattttggctgcatttga

SEQ ID NO: 1314 - DNA, 579 bp, Enterococcus faecium
  marker
taaatacagtaatctatgaaatgaaaagggttacgtttaataaaacttgaacttttttgtttttgttcaccataaatatttatttaagaaagtattaacctgcatttttctctataaaaaagattttttaaatagataaaaaaggaggattaaatgagtatttgatagtatttatattaaaattacatatgtaatttaaaaacgcttgacattgtgtttgagatcacttacttttagcatgtaaaagtattggattaaggagctatgcaaatgaaaaagaaatttattactggtgggattgtcgttgcatttctatgtctaattggctacacaggcacgcggtacgcaaatgaaattattttgtggggtggagagacagatattgatacaatcaatgagaatctgacacagcttgatcatacattgacagataaagagcaagcgattacagatcttaccgctcgactagcacaaaaagaacagacattgcaagattcaaaggcagatgtccaagaataccaaacaaaagtaaatgaattagaaaaccaaaaaaatcaatcggcagcagaaaaacaaaac

SEQ ID NO: 1315 - DNA, 560 bp, Enterococcus faecium
  marker
caagtaggcgagtttacggcttcaaaagcgagccaagtcttatcgacagatggtatgctgatcaagcgaccactgatcttacgagaggaccagcttgttgcaattggattcaatgaaaaaatttatgaaggagaactgatataaaatggcaggcaagcatttgaagaaaaaggacaacctttggatcttatttaatggaaaagaatactgtgttggtttgacaaatgaagcgcaagaagaacttggagacatcacgtttgccaatctgccaaaagcaggacaatcgctaaaaaaagatgaacctctgatcgaagttgaagcggaaaaagcggtcaatgaatttgccagcccgctaacgggtacagtttcttctgttaatgataaaatcggtgaagatatcaatatcttgaatgattcagatgaaatgaatgcgtggatcttaagtttcaaagatgttgatccaaaagaatttgacgaattataaaatcagaaaatcacttgaaaaaagttgacactgattcttccagttgctataatcataagcaatcctatatgaaacg

SEQ ID NO: 1316 - DNA, 547 bp, Enterococcus faecium
  marker
cattctccatttcaaacattttttggaggaatctggagacgctgatctgctgaaggcggaatattttacggttcgtgtctatttgagtgcattagctgatcatcgtcctagctatagcagaaattctatcagtcgcaagatagccagcctacgttcgttttatcagtatcttctcaaagaagaagtgataaaagaaaatccattttcttacgttcatctcaaaaagaaaaatttgagactgccacgttttttttatgaaaatgaaatgcaagcactttttgacagcgtagcaggagatagtcctttggatttgaggaaccgcgctttactggaagtcctttacgggtcaggcatccgtttaagtgagtgtagcagtttgtcggtatcagacattgattttgattcagaggtcatgttgatccatggtaaagggaacaaagagagatatgctcctctaggttcttttgctcaagatgctctgcaagaatatttcagggaaggccgccaggtattgatgacaaaatatcacgaagagcatgatatcgtt

SEQ ID NO: 1317 - DNA, 523 bp, Enterococcus faecium
  marker
ggaaaaatccatgattcgatccattactttggctgcttgagttcctcgatcaaaaatatcacccacgatatgcaaatgatcgatgacagatttttggatcgtctgcgcaagttttgttaaaaatttttcttcttccttcatcaagacaagttgttcaatgattttttttacatagtcttttttcccattgatacgatcatcgatatacaagagttcctcaatgatatagctatattctttcggcaatccttttcgaacttttgatcgagtgtatttgactgtcgtaaaccgtaaaagatcgatcaaacgatggatcagctgggatttatcttgttttttgtaccaatcagtcgtcaatgcatattctggataagccgtaaaaatagtgaattggctgatctccgtttccgtcatttgttcagagaaaaggtctttgatcttttctttaagatttcctgaaccgatacgcagaatatgatcaaaagcaggaaattcgccatgtatatcgctcaaaaataactct

SEQ ID NO: 1318 - DNA, 518 bp, Enterococcus faecium
  marker
gtttgatttatctgctgtagtggaagctgctcaaaaagggatcgttttcgaagcagtgacaaaattcccagcagtcagccgggacatcgctttgcttgtaaaagaaactgtgacaaatcaggaattaacagaagttatccgttctgctgccggaagatttttaacagatatccaattatttgatgtctatcaaggagaaaacattgaaaaaggacataaatccatggcgtatagcctgacattcgtcaacccagaagcaacattgacagatgaagaaatcaataaaggaatggaaaaagtcgaaaaagcgttggtagaaaacctagaggcaagtattcgctaagagggaaaatatagtaagtaacgatcaagtagcttttgaagaccatatatttgaaaaagagatgtgacacaacttcgtcacatctctttttttgattttaaaaaaggaatagcacagagacgagataaaaaaacaggcctttacagcctgtttttttagagtaaatgaattaatg

SEQ ID NO: 1319 - DNA, 511 bp, Enterococcus faecium
  marker
gaattgaccagtttttaaagcctgcccaatgataggtaattcattctctacataccaattattccgtaaaaatgtatgggaaatacctgaatccttaatcattttttcagtgaattggtgatctggcgctaatacactgatcgagtgatcggcatctgcaaaacttgtataagcgatataagataccccagctgcttgtgctgccttcactacattcttatgttcggcttgacgatttcctggaacgccagagacaaaaagcaatcgatctattcctttcaacgcttctttcattgagtctaaatcatcataatcaccaatacgtatattaaatccagcttctttcagtgcttctcctttttcttcactacgtactagtacatagatttcattttgtggaaccatcttttttaagaattccagcgcataaccaccaaaacctccagttgctcctgttactaaataatgcatatttgccactccctattctttttatttgttaagatttaca

SEQ ID NO: 1320 - DNA, 510 bp, Enterococcus faecium
  marker
ggtcagggagacgcgatgactacggataatgcgattttgttagggattgcagatgaaaatccagagtatgagttagttggtggaacatttactaatgagccttacgggattgcgatcaacaaagggcaagaaaacttcttgaaagctgttaatcaagcgctagaggaaatgcatgcagatggcacatacgataaaatctatcaaaaatggtttccaaatgaaactgaaggaaaagtagagtaagggggagaggcaatgagcgaattgatacagacttatggaccaatctttgtcgacgggttcaagatcacattgttttcgagtgtcttagcacttgtgtttagtttgattatcggaacgttaatggcaatcttccaattatcaaagaataaagtagtgagcgccttagcaaaggcatatgtagaattttttagaaacattccattattaatcatcgtgatgtttttttatgttgttgtaccgatttattggtttaatctagatggattc

SEQ ID NO: 1321 - DNA, 506 bp, Enterococcus faecium
  marker
aaaacgcgtagtttaatgaaacgcttggacacagcgaaaatggctgaacttgctgatcgtgcattgaaagaatgcgatatgatggaagaagtcgttgaacttgttcatgaatatgtaaaataaacaacgtatcaaaagctggtgtggcttgtaaaagagctacgccagttttttaaaaaaatgttcttttttaagaaaacgtttttgtcagtaagaatagacaaaaatagggcttaagtttgagtgacagtttgtaggctatgttatactatataagtgaagggggacgtaaggtgaaggtattattatattttgaaagtgaaaagatgcttgcaaaatctggaatcgggcgtgcgcttgatcatcaaaaacgtgctctgacggaagtcggtatctcttatacactagatgaaaaagaagattatgacatcctgcacatcaatacatacggaatcaatagtcataatatggtcaataaagccagaagagaaggaaaaaaagttgtc

SEQ ID NO: 1322 - DNA, 498 bp, Enterococcus faecium
  marker
tttttcaaaaaagacacctctttacgatttgtaagtctgagcacttaatatcttaccgtttttcctgaaaagaaacaacagttcctaatgaaaaaacaaggaaagaggataaaataactaatagattagaaatggaagaaatatttatgggagaataaacgttctaagaaactttacaaattactaaactatcagatataatgtattttattatacatctttaaaagaaatcttactaaataataatgggagtgtaattctatggcaatgattaaatttgatcacgtggataaatattatggcaagttccacgcattaaaaaatatcaatctcgaattcgagaaaggagaagttgtcgttgtcattggtccttctggttcaggaaagagcacgatgcttcgctgtatcaatggattagagacgatttcttcaggcaagctactaattaatgatactgacttgcatgataaaaagacaaagttgacagaagtccgaaag

SEQ ID NO: 1323 - DNA, 479 bp, Enterococcus faecium
  marker
atgagcatctggatgtactgcttgtttgtgacctgtgagcaaattatctaccacagctacttgataccccttttgaactagctggtctacagcgtgcgaaccgatataaccggctccgcctagtactaaaattgtcataaaaaacactcctttgattagtaaaattgtgtttgttgattctatataatttaaaaaaacgaagtttacttttatggtgaaaacaaacaaagtaaaatttcgtaaattcatatggtaaatttataataaaacatttagtaaacattttcaagggttttttgcaaaggtttacaaacaaacgtaaaactagcctttttttctcttttgttccataatagatataacaaataataaatgaggtggattcaatgaaaaaatttgtatctggaatattagtaggaagtctggcaacagccgctgccgttgctggtttggttgcttctgtgaaaaaaacagtgatc

SEQ ID NO: 1324 - DNA, 475 bp, Enterococcus faecium
  marker
gtttccgaattaaaagatggtgcaacaatcattacttcaaattctgaatcagactggggacgcatcatcacaattctacaagatgctggcttagtcaaagtcaaagatggagtagatctggaaacagcaacattcgatgatattgaagaaaaccctaagaacttgaagttcaaccatacgatcgacccatcacttttagcttctacgtaccaaaatgatgaaggtgacctagttgcaatcaacgcaaacttcgcttacggcgcagggttgaatccattagaagatgccgtattgcttgaaaaggacaactctccttacgtgaatattattgcgactcgtaaaggtgatgaagacagtgacaaaatcaaaaaactgattgaagtgcttcaccgcaaagaagtccaagaatggatcacagacaaatggggcggctctgttaaaccagtaaaggctgatgcaaaataaggtatggaac

SEQ ID NO: 1325 - DNA, 465 bp, Enterococcus faecium
  marker
aaatttggttcagtaatcacattttctcgataaggaaaaattccttgatcaccgtaaaaacagtccgtgttatcttccccaacaacatggaacgcatactgtaagcgccttgtttcgctcgtcacttcaatttcccaataatcatgaacattggtacttagacattttttcattggtcgttgtttttgataccatttttcagttgttatggtatatggatctccacaaagcacatatacttttttgatatcatttttcctagtacgaagccgaatacgaaatcttgtattcgtatatagaaatgcatattcactttccggtcgatgataaattgcagctgtatccattgatttcctccttgtgttttaatatgacgtcatcactataagtgatagagaaacaaaagacaacgctttcaaaaatgttatcggtaacagattttttgataccgaatttttatttttt

SEQ ID NO: 1326 - DNA, 463 bp, Enterococcus faecium
  marker
cgatcttattttgatgaatccgacgaaacgttaggttatgggatattagataaagatttattcagagaatctgcccaatatcttgagcatctacaacagccgttttacacgaaatttctttccgtaaccaaccacacgccttattatacggatgacaagaatttcgactttccatctttgaatactggcaatagcacagtagataattatgttcgaacggcacattatctggatcaatcattggaacaattttttacgtatttgaaaaaatctggtatttaccaaaattcaatctttgtgatttacggggatcattttgggatctcgaatacagataataaagatttagcaagcgctcttggtaaagatccagatacatgggatgaatttgacaacgcacagatgcaacgagtgccattgatgatccatatgcctggttatactaaagggacagtcaatcatg

SEQ ID NO: 1327 - DNA, 460 bp, Enterococcus faecium
  marker
gcaaatcgagatttgtttctgacacttccggatcatcagcgaatccaagaatgatttctttgactttttctgctgctttctctggttcgtccgtatctccgctgaagtccgcaaagtgaaattcacgatccaagctgaattcaaaaccaaagctgtcatcgataattccttgattgtacatcgctagatagtttcgagaagtattgcctaaaatcatttggaacaacagattgattgctgttttatagcgtaacagttctgttccttcttgcggcaatgtgtctaatcctttaataccaagtacaaatttatctcgtgtaatggctgcttccaatgcactttgtttgatgatttcttttgtgttttcagggaaataacgtacaatttcttgctttggagggaaattttttgcttcttggttttcccgaataagtttcatcaatttctcaggctccatctt

SEQ ID NO: 1328 - DNA, 438 bp, Enterococcus faecium
  marker
aattgacgcaagatagtaaacgagcaactgaaaaacgccgtcggatcaatttgacttcaaaagaaatcagcgaattgttagcggaaggaatcatcacgattatccttttgcttctattaaatgtttctattctggttgttatcagttcggtgatcaacagttcaccttctttgacgaatgcgatttgggattcaaagaatatttttgcagaacgattgaacactgatttgttctggaacggccggaattttattattccctttttctttctattagatattggtgttttgtattggcgcttgattcgaagatatcgccaaatgcaattgcggcatatcatcagcgaacttcactacatcgcaaacggaaattatgatcatcgtatcccttttgaactgagtggtgacttaagccgagtggtaacaagtatcaatggat

SEQ ID NO: 1329 - DNA, 424 bp, Enterococcus faecium
  marker
tctcattgtgattcctccaatgtcttccaagtatgtccgtagtgattcaactaaataggatgctagattgattcgaattcatcatataaatgactgtcatcttcgaatagtcctgtcttttttcctagatatgcagcgccaagggcaagcaaacctaaaccgatgccgactttgattaattttttactcatgaaaaacgcctccttgttttctctttctatatccaaggatagttcgtttttattagaatgccaaatgataggacgagaagaaaaaggaaattttgacaaaaaagaagaagtgtctgattttcctgtaaataaaaatagggtaggtaagaagaaaagatttgaggaggtgtatggttctatttttagaaatttgggtacaaaaaaagcaccgagacagtgcttctttgaaaagc

SEQ ID NO: 1330 - DNA, 417 bp, Enterococcus faecium
  marker
caggactactactgaatgcaggagcagatcaaggaattgcacgtttagcgggtaatattgggtatccagcaagtggtgtagcgcaagaagcaaaatcagaagataaaattgtgatggaattgtctagcttccaactcatgggaatcacagatttccgccctcatatagcggtgattaccaatatctatgaagcacatattgattatcatggtacaagaaaagaatatgtcaaagctaaatggaaccttcaaaaaaacatgacagaaaaagattatctgatccttaactggaatcagtcagaactacaagaattagcgcaaagaacaaaagcacgcgtactgcctttctcgacaaaagaagtgttggaagacggtgtgtatgctgacgattactcaatatactataaaaaagaaaaaa

SEQ ID NO: 1331 - DNA, 392 bp, Enterococcus faecium
  marker
tttttttaaatgaaaaaccatgtttcaataaaatctcttttgttctagagggtgtcgcaatttcacgatattcactcatgttgttcctccactattttcattgcttgggcgagttctttcggcgtaatacgaaacatcttcaaacgtttttccaattgtttgccgttcgtgtaaccgatgcgcaactcgtcacctagtttttctcgtttttcttttgcttgtgccccagctattaaaccatagtctaaaaggtcttgtctagtgatttcagaaacagccgtttgggaaatgtctggcgtcacgacctttttcaatgcttctaaaatagcagcatcacttgcatgctcgacaccaaggcttccctttttctttggtttagcttgtgtgcgcgg

SEQ ID NO: 1332 - DNA, 389 bp, Enterococcus faecium
  marker
gcttcaaaaatctcttgttctgctggcaattctgaaagaacaccattttctcttgccttagcgacaagctgatccaataagtctacagattcttccttaactggtcttacttcaatgctttctagagcatcttctcctaccatccctaaaagacgattctgtaaatataagcggtccatttccatccatccgccagcttcgatcgcaagtgtggcaaaatcacaaatcgtttgactgattgacatatctcattcccctattcttcataaccatttggatggctgacatgccaatcccatgctgttttgataatcgctttgatatctgtgtattcaggtttccagcccagaatctctctcgctttttcacttgaagcgactaatcggcta

SEQ ID NO: 1333 - DNA, 383 bp, Enterococcus faecium
  marker
gcgatcagagaatatgtagatgaagatagaatggtacaatcattgagtttctttgatgtagtgaaacgtggtattcgtagtatgtttaaacgcaagtaaaaaataaagaaaacttctaagaggaggttttctttatttttttactttgcagaagaaaatatgaaatagcaaaaccaattatttgtcccctttaaatcccatatgctaaaattgattagcaaagaaggaggttatattatgagttggttatggacattgattgttggagccgtgatcggagcaattgcaggtgcgatcaccagtaaaggaaattcgatgggctgtgtaacgaatatcattgctggactagtcggttcaagtattggacaagcgattttcggcga

SEQ ID NO: 1334 - DNA, 364 bp, Enterococcus faecium
  marker
ttcgtgataatagctatctaataattgactgagtgttggataagctgttacagcagatgcctgttcggacaatacctgataagcaatcggtgtgaaaaaatctttattttccgtttcgtaaaaagtaggaataggctgatggctgatggctgagaaaaattcgtcccatacaaccatcttttcattaggacgttccagtaatcttttggtcagctcttgagcgatatcgaaaccgattccctgaaactgacgttggattgcttttggatctagttcagtttgggaaagccgctgaaagattttttctttctcggagctaaatgggttcaagacctcttgttttggcggagcaacatattctaca

SEQ ID NO: 1335 - DNA, 363 bp, Enterococcus faecium
  marker
cgattcgtgaggagggaccaaagtggcacaatagcaaagccggaactcctacaatgggcggcttagtgtttctgatcggctctattttgacaggaatttgggttggagcttggcaaaaacagctaactcctactcttttcatcttgctttttgtattagcgttatacggagtaatcggctttcttgatgattttataaaaatattcaagaaaagaaacatgggactgaactcgaagcagaaattgattggacagattctagggggaatcatcttttatcttgtttaccgttctgaaggttatccaggtgtattgaatttcttcggactagatctacctttaggaatcatttatggtattttcg

SEQ ID NO: 1336 - DNA, 362 bp, Enterococcus faecium
  marker
cagcagaaatgtgagagactttttcgaaaatccaaatgaagtccgagcacagcaatttatcagtaaagttatcaatcattgataggaggaaaaagatgcgcaggttaaaaaaaatacgcctgattttccttttaggcattgcttttcttgcactagccggatgtaaaggaaatgggttggcaaatgaagatattttagagcgaagcaaatctaccaatgaaatcatctggggtgtcaagtatgatactcgattatttggaatgatggatattgagagcagaactgtacaaggatttgatgtagatattgcaaaagcaatcactaaaaagatccttggtgacaatggaaaaacagaatttgtt

SEQ ID NO: 1337 - DNA, 357 bp, Enterococcus faecium
  marker
aattccatggcttcgagtcaatccaaattataaagaaatcaatgcagaagaagcgttagcagatcaagattctgttttttatatgtacaagaaattgatcgatttgcgtagaaaacatgacatcatcgtctggggagactatgaattagtggaaaagacgcctgagcatgtctttgcctattctcgcatatatgaagaccagcaatggctcgttatttgtaatatgtccagtgaaaagcagacgttcactgttccacgtgaagctttaagggttattgtgtcaaattatcctctgaaacagttaccagacggcaaagttgatttacgaccttatgaagcatttgtgttggaagtaaa

SEQ ID NO: 1338 - DNA, 354 bp, Enterococcus faecium
  marker
tgtcatttccaacatgtcaacaacttattttttattatttaataagttattggtgttcttttgaacaaataataatatatcaacatcacatgtgaaagtcaataagaaaatgcttatttatcaacatttctagcttacatgatcattggttagttctggtcctttttcgttcgtctttataactccgagagacgtaaaatccttttgttttcagtttaatgttcatgttcttgtcttattcacaccaactagatgtctcaccttctaaaattttccttaacaaagtgctgcttttatctatttctgcttttttttgctagaataatagtaacaatatgactctggaggatttat

SEQ ID NO: 1339 - DNA, 352 bp, Enterococcus faecium
  marker
attgcgaatgaatttgatcagcggactattagatgatatcagttataacactgctcgaaaaaatacagagattgctttatatgaaattgggcgggtattcttccaagaaaatgatccgtgcacacatctgccgcaagaagtaaaacatgcagcaatcgctgtttctggtatttgggaagaaaaagattggcagacgaaagctcaaaatgtagactttttcaccatcaagggtcttttagaaaacttatttgaacaactaggcatcactgaagatgtccattatcaaacagtgacagaaatgaaggaaatgcatcctggaagaactgctgcgatttaccttggcgaaaaattt

SEQ ID NO: 1340 - DNA, 352 bp, Enterococcus faecium
  marker
catttttttagcaaataattgggaaacgtaccttttgttggcatttttcacattactttctgtcttcttgtcaaaagtagatttgaaattttttatccgaggcattcgcccattgatctggctaatcctcttcactgtagctttgcaggtcttgtttacaagtggcggagaaacttattggagttggggtgttttccatatcactgaatttggtgtgatgaacggcctctttattttctgtcgattcgtgttgatcatttttatgtcgactctactcacgcttactacaccgcctttggaattatcggatgcgattgagtacttgcttcgtccattgaaagccgtacggttc

SEQ ID NO: 1341 - DNA, 352 bp, Enterococcus faecium
  marker
ctttcgaaatgcttcttctcggatatctgcacttacgccttgagctacttttgcagagaaaatcgtgttcgttacacctgcggctaatcctagcaaagccagactgatcaggtaaataccaattgttttcatttcatcattatcttctgtaataatagcttccaatacttgctgtagtaacttaggttgccataatgctgctgcaaccatgactgctacggacagcaaggaaataaaaacagctactttatattttttcgcatgtcgtaagattaatttcattcgttgattacacccctttgtttaaattgacaggactaatttaacactgtaaaattagaccgactaacaa

SEQ ID NO: 1342 - DNA, 344 bp, Enterococcus faecium
  marker
cagctatggtgtaatagcaccgcttcgcgtgattcctactggtatcgacattgaaaaattcaaacgttctgatatcactcagcaggatatcagcaaattaagggagtcactaggtcttcaggaaaaccatttgatgattctttctttaagcaggatttcttatgagaaaaatatccaagccttgattaatgggtttcctcaggtcatctccgcttatcctaacgccagattagttatcgtaggaaaaggaccttatgtagaagagttagaggaattgatctcagaactgcagttagaagaatttgtgcagttcacaggagaagtggacaacaatgatgtagcac

SEQ ID NO: 1343 - DNA, 320 bp, Enterococcus faecium
  marker
agatatttttccgagtctagctcagcgctgctcctcaagcgaatatcgcttggggagtaagcactcatcataaagtgtttttttataccttcaattacctgtcatgacagatatgtttgaaggcataaaaaaacattttaagcgagaaataattgaaaattttgtctttttttgatagtgttagtaggaactttaggatgaagaaggagtaatcatggagccaattattgaattagaaaagataaattataaataccagccagatgatcttcgccccgcattgaaagatgtctcctttacaattgataaaggtgagtgga

SEQ ID NO: 1344 - DNA, 313 bp, Enterococcus faecium
  marker
tatacattattcctgatccaatatttcttttaatgctgcttcaagagaagttaatggttttcccaatactttttctaaatcatcagaggaaatagctaactgatcctttttaatatcatgttggatcgctaaaaacatgtcagctgcttcttgagggaatccggcttcttttagattttcgacaaacgctgcatcacttgcttcaataatttctaactctttacctgtcgcacgctctaatgccttggctaattcttcatagtcagttagattgccggataattctaagatttctggagagtcactttctact

SEQ ID NO: 1345 - DNA, 313 bp, Enterococcus faecium
  marker
cacgtcataatcatctagccgctcaaataaatcttgtttcgtttccaataactctactgatggcacgatctgccgatgggattgttccgctgcctcttgagcaatcttttcaagccgttgttgtcgtttcatacgtttttttgcatcccatttaacgacagaggctgatgccgggaaaccaagaaaagcttgcgctcctaattcagtggatttctgaacgatccaatccagcttttcccctttaggatagccactcgctatggtaatcgaacttggcagttccttttgattttcttcttttttaatttctttc

SEQ ID NO: 1346 - DNA, 310 bp, Enterococcus faecium
  marker
cccgcgtaacatagctgcgcgtgcgtcttctgcaaatttcaattcttttgccatgattgattcacctcattgattatttttgattattttttatatcttccaaatttactcaacaatcgccatgatatcttttcctgcgacgatcagatattcttttccttcgtattttacttctgtaccggcgtatttttcgaacataacttggtcgcctgcttttacagcggcaggaactttttcaccgttttctaacaaacggccttcaccgactgcaacaactgtcccagtttggggtttctctttagcagcagaa

SEQ ID NO: 1347 - DNA, 302 bp, Enterococcus faecium
  marker
cgtgtattgcattggcataatagagacacgatggttatcattgcttttgtattattaactgtgctactgatctttttaagaggataaacgttcagtgggccgctatctattcttttcttgctgatctgtttgcaagaaaggatgcaagcagtgtatgacaagaaatattagggtctgtggcagactaaggtcacaggcctctttcttttatctgaaaagaaagaacgaaaaaattttatagaaaaatcattaattccagataaccttttaggaacaaaggagagaaaaacatggtacgttac

SEQ ID NO: 1348 - DNA, 294 bp, Enterococcus faecium
  marker
aagcaaacaaaacgtacttgttcgagatattccagtgtataatggctggttagaagatagcaagaactgctatatggggaagacaaacgaagaatttatccgactgatccaacagattaccaatcaagaactaccgagtacgacacaagccggttatcaaacagcaaaagagcgaagtatcaataaaatcggtgaagaacttaaaaatgtatacgaaagtgtactgaatgaaaaagtctctagcaaattaaaaaaagtaaatcaggtcaaggactagtttggaggcgaaaaaca

SEQ ID NO: 1349 - DNA, 283 bp, Enterococcus faecium
  marker
tgcatgtttcttgacatggctgctttcaatgactgagttttcaatgacgacgtgatcctcaatcctactgtctacgatttttgaatgtgacccgatgacacaatcagaaccaatgactgtatttccttggatttgtacacctgcttcgatcaatgtgtctggaccgatttctacgcctgcatcgatgtatgtcgttgctgaatcgacaaagcttacgccattgaccatatgcatctggttaattcgctttctcatgatctcatttgctttagctaacgcgatc

SEQ ID NO: 1350 - DNA, 281 bp, Enterococcus faecium
  marker
ggttgttgcattgattggaccgatagggataaaacctaaaggcgtaacagctaataaaatcaaaatagctaaaaacatcgcagttaatgtaaagttttttgtatttttcataagtactccttttttactaagcatttctttcattaagagtcagcatgacctgttcgatgatcgtctgaatatcagctaaggcaccttttccaaaatctccacaagctaaaagagattctcttggttcaatttcctgatagccgacagatctcaatgtttccagattacgc

SEQ ID NO: 1351 - DNA, 281 bp, Enterococcus faecium
  marker
ctccatatgacatggaagcttctgcccttggtccgatggaattgttcatattcttaggtaatccaactacaaaacggtctacttcgtactgcgccactaattccttcaaccgatcaaagccaaactcttcttctgcttcattgattcgaatgatttctactccttgagctgtccagccaaaggggtcgctcacagcaacgcctactgtcttagaaccgacatccaagcccattactctcataaattcactccatgatttgagaggtagtctttgacaatta

SEQ ID NO: 1352 - DNA, 274 bp, Enterococcus faecium
  marker
acgcaattctttttcagataatccgtttttattcaaataaacagttaacggataattttttaatttcatcaacgctaaaataacgacttccgttgaaagaaactcgtcgccgaagctttcacgtatttggtctgcttcattcaataatcgaaagaaattctggctgaggttttgtccatattggacgtttccaccagaaacaactggatactcatccagtagacgatcaatttcatgttcaaaagattcgacatccaatccggcatccgtatag

SEQ ID NO: 1353 - DNA, 274 bp, Enterococcus faecium
  marker
tcctgcaatcgtctcttcgtctgactcttcaaatagcttcgcattaaaatctaaatgatgatcgtttaaatgatagcgcccgccagttgtacgtaagcgtggattgaacattgcttggtgcttgaaaggaagctggaagctttttaatgatatctcttctactaactgctgcagttcttcttgtgtcaatttttgttactcctcattgttactcttcataaggggaaagcatcgtcaaactgattctgccttttttcgtatcgacttgttctat

SEQ ID NO: 1354 - DNA, 270 bp, Enterococcus faecium
  marker
cagttctcgctcgattgctggctgaataaagcgtttataactatcctgataggcttctctgacgaatgaagaagaaggagaggcaggatttttgactatttggcgatccaagtaagctaaaattgctgcttcatctacttgaaagaatactttcagaatatcttctttttctccacgattagtagctaatattcgatgagaaaccattttatggacgggttctgcaaagtcataatacatttcatatacgcctttttcatctgcttgctc

SEQ ID NO: 1355 - DNA, 266 bp, Enterococcus faecium
  marker
acttgttgcacgactacctgctaaatcagcaaaaacgtttttagggataaaggataaaatctgctgtggaatcgataagttttcaactgtttcctgacgtgttgccagttcagagattcgtgctgtttctgcagctccttgtgtgaatttagctccttggagtccgaacagcattgttgaaccaattccgatcaatgctgcaatagctgttgttccaagtaaagaagtcaatacagtcgcactaattttccctagcttttcagaaa

SEQ ID NO: 1356 - DNA, 265 bp, Enterococcus faecium
  marker
gatactcgtataattttggataaaatgaccaataaagtcgtgatagcgaatcacttccaaacctaattcttttgctcgctggatttcttcatgtgaatcaggaaatgcatttcctgcaatgatcgtcatccctggttttacattatctgcgttaaatggcagaatcgtgatatttgctttttctaaatctctttgtgtaaagaaatatttttcaatgtctgatccttggacatttagaccttgttcatgtaaaacaagagccaag

SEQ ID NO: 1357 - DNA, 262 bp, Enterococcus faecium
  marker
aaggacaaggtccaactcaaagtaattgtcccttcttcgtgcaattggcgtaatcgtatggtgtggtgtaccatctgctgaaaaagctctgatagatactgtttcatccgaatatgctttccatttttccaatactgagttagctgcttcaataagcaagtttttctctgttgattgcaaacggatcacagacatcggccatttcacgactcctgcgatgacttgcggataatcttctagtttgataagtttttctatcggt

SEQ ID NO: 1358 - DNA, 258 bp, Enterococcus faecium
  marker
gcgacagtatacggaaagaagctaagtccaagtactggaagaggctgttattgcgaagtaacggtaaatcaaggtggtaacacggaagttcaagctttcgtccttttgcttaaggcaagagggcgaaggcttttttgtttgaaaaatcataagagaaagatgtgaatggcatgtcattaatccaactaacgaatgtcaaaaagacattcaatgggaaaaacggaaacatccaagccgtcaatgacgtttcactaaacg

SEQ ID NO: 1359 - DNA, 250 bp, Enterococcus faecium
  marker
caaccatgcgactgttggagaagccagtgaggttgctgcagcaatgatcgtttctcttgcgggtggggaagttctacaaggcgcggtcaaaggctcagagatcaaagcagaagacgtatcagtgaagatttcacttgaacgcatcaatcaatatttaggaacatctcttgtcgttaaagaagtaaatgagatttttgaagcacttggatttagctatgaagaaaaggagcatgtttattccgtagtagta

SEQ ID NO: 1360 - DNA, 248 bp, Enterococcus faecium
  marker
caactctagaattctacctaataaatagtagtcatattttttaaataaatcaagtgattttgcaaaagtcttagtttagataagggagtttttttgcatatccttctttattgacttgtcttgctctcgcaattgccagcgcatattctggaatattgtctgtaattgttgacccggcagcaatcgaactgtttttagctacctcgacaggtccgatgatattcgtgctagaaccaataaagctgtgg

SEQ ID NO: 1361 - DNA, 244 bp, Enterococcus faecium
  marker
tatcttcatctgatttgcctttattgtaatcatctagataatccaagatcttttctttgtcttcaaaattgttcggataaatcatgatacttgaaggcaagctgtctccacctaaataactaagcaatgtttgtttggcattttcgtcaactttttcagtagttaagacatttacaccactgtctctttgagctttgacgatttctgattctttgttttcgttgacgatttgagtcgttaattg

SEQ ID NO: 1362 - DNA, 240 bp, Enterococcus faecium
  marker
gcaccaatcaaaatcagtgagtggacaatcaaaacagcaagcaatgctacgtaagaagcaacgacaaatttacctaaattgacgatagctgcaaaatcacttgttgccaaaacgtttgtcatcaaagcaaatactccataaggtgtcaaacgcaaaacaagcgtcacgatccgcataatgattttatacagactgtcgactaaatctgaaaagaatgctgcttcttttggcgcttttctt

SEQ ID NO: 1363 - DNA, 230 bp, Enterococcus faecium
  marker
gatcacccaactcgtttcgtttagcaaagtggaaatggatcactcgatcattttcgatttgttcgatgtcttctaaaatagcgccatccaaatattttcgaagcatcatcacgaagttaggcggattatcaggattctgataatcgatttgggtaatctgtacacgagcataacttgggtgcgcagataataataatcgatggtttttgccgcgtgaacgaatcaccagc

SEQ ID NO: 1364 - DNA, 224 bp, Enterococcus faecium
  marker
cggatcgaaccagctttctcctatcgtaaaaaaatatctggtaggattgtaccaaaaagcggactatctgatcacgccaacaccttattcaaaacagttgttggaaagctatggtatccgtgtgccgattcaagctatttccaatgggatcgacttagagaaatatcaccctgatccaatgaaagaacaaaagttcagagaatatttcaaactgtctccggatc

SEQ ID NO: 1365 - DNA, 220 bp, Enterococcus faecium
  marker
tacacggaccactccagcttctaaatcgacttctttgacgacagaagcgatatatggaagcaatatatcagcttttttcggacgttgaacgacccaaacatcattggcacctggtgacaagatttcttttactttacctaactcagttccatcttctaaaaatacatgcagaccgatgatctcatggtaatagaattcattttcagctagatctacagag

SEQ ID NO: 1366 - DNA, 211 bp, Enterococcus faecium
  marker
tgcagctactttagcagcttcttcactacctttacgtaagatttccataacagctgaaggatctttttccaattcttctcggcgcgcacggatcggtgcaaattcagcttccaatacatcaatgaggtatcgtttgatctttacatcaccaagtccgccgcggcggtaatgagctttcatttcttcaattgcttctttatctgttccgaat

SEQ ID NO: 1367 - DNA, 204 bp, Enterococcus faecium
  marker
gataaagttggctgcactagctagtacataaaacagcaagagtttccatattacagaaacaaatttgcttttatcgtctacgccttgcatcaagcctcctacgtaattagctaattcttgaaaagcttccccgatgtattgaggtgcctttacttgtagataggtagcaatgatcactgtgataaagataaagaaaaaggagag

SEQ ID NO: 1368 - DNA, 202 bp, Enterococcus faecium
  marker
gattcttccaacttgacgcagcagttcaggttctcctaacaaatcagagagataaacatatcctcctggaagcagacggtcttgttctgatagacgttctgctagagattcaatatattttttcgcctcttcatatgaaatttcagggatgaacaatacaccacctgcagcacccgggattgtttccaaggttccataccct

SEQ ID NO: 1369 - DNA, 201 bp, Enterococcus faecium
  marker
aatggacccattagtgaaaataactgctgtatcttcatcgaccacaacgtattcttcttcttgagtcagtgtattggtaattttcaaaccagtcacagtgatttcatcttgcatcggtgtttctttgaattcccagtcagtgacacggcggttcaaaatgattttgcatccttgttctttcaagtactcgatcaaaggaag

SEQ ID NO: 1370 - DNA, 201 bp, Enterococcus faecium
  marker
cttgcaaaaatcaggtgatgtatcaatcgaataccgattgatcaatgaagaaggtccagctcatgaacgagtattttggatcgaagtttatgtagatgatcaattgattggcactggacaagggaaatcgaaaaaattagcagaacaagctgcggcggaaaatgcattggcagcactgtaaaagtaagtgagggaaagctt

SEQ ID NO: 1371 - DNA, 191 bp, Enterococcus faecium
  marker
tggaaaaaaaggctgtgacaagacttttgtcacagcccctttcctgggcttatttatcacccattttattgtaattgctagttatacataaacaagagattttatgcataatgttttattgctgagaaaaatattcagctgttgcttgttcatcctccttgagttgttcaatcaattcctctacactagaa

SEQ ID NO: 1372 - DNA, 189 bp, Enterococcus faecium
  marker
aaacgaacaggtgctgtcttgaaatatatcgaactaacagaagaaggcttcctggatatggaggatgcagcgaaaaagattacggacaaaaccaaaatcgtctccattgctcatgtatccaatgtcttaggtgtcttcaatcctgttcaagaattagctgaacttgtccatgaaaacggcggggtcatc

SEQ ID NO: 1373 - DNA, 187 bp, Enterococcus faecium
  marker
atttaagttctgatgtttgacatacacttcgagtttccggggctctttgtggggcaaacaataccatttaacatattacccgctaatctagtcaatgtcaacgtttttctgcttgattgaaaaatttatatgaaactttacttcattttctttcttttatataaaagggtcgtttcctgtcaaaatg

SEQ ID NO: 1374 - DNA, 185 bp, Enterococcus faecium
  marker
tgcatcaactacttcccgcagccttcttgtatcgtcttttccttcaacgactataatctcttggatcttcatcttatccatgttcgcttagaccaaataatcggtgcgcatttgtccatgtttgggcagccacttcttctgtcggaagattccgaagttcagcaatcttttctactgtataacga

SEQ ID NO: 1375 - DNA, 184 bp, Enterococcus faecium
  marker
agatgaacgaaaaaaacaggtcgacttttcagatgtctatttcgatgctggccaagctttgttggtaaagaaaggaagccaaatcaaaagtgtagatgatttgaatgcttctacaacggttctagcagtcaaaggttctacatcggctgcgaatatccgacagcatgcaccagatgcaaaaatt

SEQ ID NO: 1376 - DNA, 181 bp, Enterococcus faecium
  marker
tgtggctttaaatatgggacaaaaatagatgccattgacgccaaggtccgtcaagtaatccaaatgatccctcacaccttgcaaatctcccccgaagaagtcttctcggtctggatctttacttccccaaggtaaagtgtgttcggggtcatttgctttgtccccgtttgcaaatctttcg

SEQ ID NO: 1377 - DNA, 177 bp, Enterococcus faecium
  marker
tgaagcaattccaccaattaacgtaggatcatctttaacaagatcgctcacaaaaaagatcgccccaaccacagccaaattggcagccagcatgaaggacgggatcatcacagaaaataatgtaccgactatgatgttgtgttttgttaagtcctcacttactttgctgaatgactt

SEQ ID NO: 1378 - DNA, 176 bp, Enterococcus faecium
  marker
aatatcggattacttcctttaacagggatcccattgcctttcattagtcagggaggatcctcgattttagggaacatgatcggtatcgggttgatattatcgatgagataccaaaatgaagcacctgcaagatcttcaaggaggtaagaaaattgtacaccttttactggtacccg

SEQ ID NO: 1379 - DNA, 173 bp, Enterococcus faecium
  marker
cgtagaaattgctaagaagatgcccgaatacacatttatttggtttggtcatgttcccatgtactcgattcctcggaacatccggaaaattgtaaaagaagatcatcctgaaaatgtcctgtttcctggttacattcgtggagagatcatagaaggtgcgtattcaggtgcag

SEQ ID NO: 1380 - DNA, 173 bp, Enterococcus faecium
  marker
tgatagaaaagctgatatctttaagcgtatctgtatcctcaccaggataacgaaaagaaacatggtcaaaagtgacagaacccgtcaactcttgttctggaacgtctaaataagtaagatctggttcagcatctaaaatttccgcaatccgcttcagcgatacggctgctctt

SEQ ID NO: 1381 - DNA, 172 bp, Enterococcus faecium
  marker
acagttttttggttgatcagcattgtgacttcgttgatcacattatggatcgtttggtaggagatgacgggaaatgaaaaaaatatcaacatatgaaaataagaaagtgcttgtcttaggactcgcaaaaagcggagtaagtgcggccaaattattacatgaattgggcgca

SEQ ID NO: 1382 - DNA, 169 bp, Enterococcus faecium
  marker
tgatcaatatgttttgttgggcaagggagaagagaattcaggaggacgtacgcgaccagcattgctttgcgacctattcgaagcttttttaggcgcgttatatcttgaccagggattcgacacgacccatgcattcatcgaaaaagtgatttttcctaaagtcaaagca

SEQ ID NO: 1383 - DNA, 165 bp, Enterococcus faecium
  marker
ccatgattatgaacaagcaagagaaaaagtacgggcgttcatccatgcaaaagaaacagcagaagtgctgtttactcgtggtacgacgacaagcttgaattgggtagccagaaccttcggcgaccgctatatcaaagcaggagacgagatagtgctctcttacat

SEQ ID NO: 1384 - DNA, 164 bp, Enterococcus faecium
  marker
ttattttcgatttctttcgtataactgccagcctctgtcggatgccagccgataatactgtatatatttggatagtcatggcttaattgcaaagacttttcaatcgttggcgtatcgaagcccacgaccgccattttcgttacccccatttcttgtgctcgctg

SEQ ID NO: 1385 - DNA, 163 bp, Enterococcus faecium
  marker
acaacgagctttaaaagctaatgaggcaataaaaacagaattagaaaaaactgcaatcccaaatgagtaaggaaactccatgaagagggtgagacggatagtctcgctctttttcttgcgtttttcttaagaatttctcaaacaaaatgtgaggaattgcgcc

SEQ ID NO: 1386 - DNA, 161 bp, Enterococcus faecium
  marker
tatcaggatgaacgattagtagaattggatgaagatggactgcttcccgaaaatcatcctctaactgaaaattccttatatgaacaagtcttagaagaagtagaactaatcaaagaggctggagatgcatttaatcaagaaaaaattgctcgtggcgatca

SEQ ID NO: 1387 - DNA, 157 bp, Enterococcus faecium
  marker
ttcatctgaagcgtccggtttgccgaatgtgatattgtctttgatcgttccggagaacaatacagattcttgcaaaacgattcctacatgtctacgtaatgcatcaagatcataatctcggatatctattccatcgatgactactgaaccatcattg

SEQ ID NO: 1388 - DNA, 156 bp, Enterococcus faecium
  marker
aaactttcctttaaaatcagagatacacagctacctaaacaaatcccagtaagtggtatggttgagcgattaccagttgatcatccagacgtattttccgtttatgacaaatttgcccaacaaaaccatggtgctttattccgcagtgattttcat

SEQ ID NO: 1389 - DNA, 153 bp, Enterococcus faecium
  marker
agtaacgactttgtcgtctacaccaaagatcaattgaagcagaccgccaaagacgataccaactcctaatgctgtaaagacgcgtgttgaaaattttgtatggcgcttttgcatacgatagaacacatataataatgccgcaaaaactagaac

SEQ ID NO: 1390 - DNA, 150 bp, Enterococcus faecium
  marker
agaataaggtgaaccgtctaatgtgatcaagcgttcggatacttcatctaactgagcgttcaaatcatccatgaactcatccatcattgggtgcaatgtaaggaaacctggtcctctcatgtaccaatgtgtttggtgaacaacaacaga

SEQ ID NO: 1391 - DNA, 148 bp, Enterococcus faecium
  marker
taacggaagctcctcatgaaatgtttctctaacagctgttgacaaatcggtctttaaaatatcttgatgtacaatagtcacattgtcatagggttgcatcgtatcagccaatacagggatcaaacgatcatcgatctcaaatgctacg

SEQ ID NO: 1392 - DNA, 133 bp, Enterococcus faecium
  marker
tgtcaatacttctggtactttcatccctttatattctgccgggcgagtatattggggatgttccaataaaccggttgaataagaatccgtttgagctgaagtctgattccctaacacatctggcaaaagccga

SEQ ID NO: 1393 - DNA, 131 bp, Enterococcus faecium
  marker
gactcctacattcgatgacgaaaagctggtagaatcctcacgtcctgctagcgataaaattcaagtggaagttgaagataaagaagcagttcctgcttatcaaatcagaatcattgaaggagtaagaatcc

SEQ ID NO: 1394 - DNA, 130 bp, Enterococcus faecium
  marker
ctttcaccgtctagattcattcgaataatccggtgattggtgcgggctggatagttcaagcgacctctatatccttcgttttccatgcaaagcatgcaggtaggatagtctacttttaccgcctcgcgtt

SEQ ID NO: 1395 - DNA, 129 bp, Enterococcus faecium
  marker
tcgcttcttggttcgatttttgtcacgattggcttatcgaatcgcccgctgtcttgcaatgcttgttttgaacgctctgcaatatttcgttcttcttcatcattatagtagatcactggacgataagaa

SEQ ID NO: 1396 - DNA, 127 bp, Enterococcus faecium
  marker
agtaccactcctctaatttagtttatctattaaaataattgattttttcatttaagtcaatgatctacttggaatcaagttagctttctcatagaataccaatataaagcgtttacatctgtgtgta

SEQ ID NO: 1397 - DNA, 121 bp, Enterococcus faecium
  marker
tgcgatgacaatcgtcgttgttcccttcaaatctcgatcgagtgcttctcggaccagcttttcagagcgagcatccagtgcactcgtactgtcatctaggatcaagatctttggattaccg

SEQ ID NO: 1398 - DNA, 118 bp, Enterococcus faecium
  marker
ccgatagcacgtatacaagtcttgagctgtgattttgtcgatactttcaaccgtgcccgcaatatcgatatgcaatgggtgtgtaggatacaagttatttagtatgccaaaaaacatc

SEQ ID NO: 1399 - DNA, 115 bp, Enterococcus faecium
  marker
ttgttttggtgtttctttaaacaagacagcttgatcgcttgttacttctaacaaggctttcccatattcgcggtttttagcaggctctacggaaccgccaagtttgtacgtgatc

SEQ ID NO: 1400 - DNA, 112 bp, Enterococcus faecium
  marker
acttgaaaatatccagctgccgctggaattagctggcgtaccaaagagcaaacgtaaagaacgggcagaagaactgttgcgtttagtcgggttagaaggacgcggacaagca

SEQ ID NO: 1401 - DNA, 110 bp, Enterococcus faecium
  marker
taccaatcagcaacgagccgacaagtcctggtccataagtgacagcgactgccgataaatcttctgccgacacaccagcttctaccagtgcatcttccaagcataaggtg

SEQ ID NO: 1402 - DNA, 109 bp, Enterococcus faecium
  marker
ctacgacaagttgaaatcaaaagagatctttgtccgccgtgcaaaagaaaatgaaacattagtaacactagatggagaatctcgggaattgacaactgacaatctcgtc

SEQ ID NO: 1403 - DNA, 107 bp, Enterococcus faecium
  marker
gtatctcttttgcagcttacggtctaattgcttggcatcagcatcagtatgatgtattaatcatttgcttaagtgttttaggaggtttactgggtttcttcgtctac

SEQ ID NO: 1404 - DNA, 103 bp, Enterococcus faecium
  marker
caattgcacacgagcttcgattgcttctttttctccagaaccttctacgatcgttgtattgtctttatctacaacaactttagaagcatttcctaagttttcg

SEQ ID NO: 1405 - DNA, 103 bp, Enterococcus faecium
  marker
ccttgtaaatgaaagtgccgtaatcagaaataccgtaacgataagcgctacgatgatccaccataattgcggcatcgtgatcatagctaaaatgaaggcacca

SEQ ID NO: 1406 - DNA, 2321 bp, Stenotrophomonas maltophilia
  marker
  misc_feature (2113)..(2178): n = a or g or c or t
gaatcggccttaccgcacacgccagtacacgggtgcatccggagggctgagtggcgcggtggcgctgggcggccaccgcgctctgtcttgtcgtggtggttgcggcacaggcgcagtggccggcgccgccggtgccctcgcctgtcgcgttccaaagcatcaacgacgatcgattctcacaactgcgccgccaggcgatgcagttcgtggactctcggccacgacagggcttccagtttgtcgagcggcatcgagatgccgagttccagattcattgccgaggcgtgccagtgctgtggctggagaggcgctcgcaacatctgctgttgcaggtctcactggacgcggagcagcgggcgcccgccgttgtgcggcttgcgtgcgctcctccaatggcagctggagccgttggattacctggagcaggtgctggctgacgtgccggaacctgttctgttggatcgggtgctgcagattcttgctggtgatgtgcctgatggggcgcgatgtggcgtgccgtagtcgagcatggctcgactctacagagccgcgggctgcgagggttcgggcaaaaaaaaaaaagctggtcacctgcgtgacaggcattggcccagtgatcatgcgagtcacctcccggcatcgatccagcccgcatcgcgcgcacgcgcgagatcttctggcgtatcgatatccaggcccagttccggtgcctgcaggacatgcaccgtatcgacaggaagttgccgcaggcgcgctccgaagccgcggtcaccgcttgcacccacctgattgaaccatgcgcgcggcaccactgcgggaacgccaaggacatttccgtggcgggtgcccgcgcaccctgacgccgaggcgcgggcacccaaaagcagcgcctgcagatgggagcgctcgattgcgggctggtcgcatgccacgaccatcaccgcagtcaccgtgggcagcaggtgtgtgccggcaacctgcagactgctcgccaggccacgctcccagtggtggttggttaccggggtggcatccagcccggcaatgctggatgtcacggcctgtgcgttcgcgcccaccacgaccagcacttgcgctggcgcgagctccagcgccaaccgcaccacgcgatgtaccagggtctcgccctgccgggtgaggagctgcttgggctggccaagtcgggtgctcccgccggcagcaagcacgacgaccgcatgcgcgtcagtcacctgccgtgcgcgcttcgccattgctgcagctgtgcggcgatgctgagcgaaatcgcctccggccctcggccgccgatgttcaggccgaccggtgatcgaagtctcggggaaaggcggtggcgctgatccggtgtcagcagcttgaacaggtcctcgcgccttcgccgcggacccagcagtccaatgaaggcaacctcggtatcagccagggccaccagcgcctcccggtccagttcgaaatcgtgatgcatcaccagcaccgcgtcgcacgggtcggcatggagggcctcggccgggctggtctgaagatgtgcatccgcgcactgcccggctgaggcccagcgcgctcgccgttcggccacgctgacccgccaccccaggccccgcagcaacggaaccaggaagggcgtttcgggaccgccccccaacaccagggcccgcggaagccggggcaacggcaaacgccacgcgccctcgccaaagggctgcgcaccctccatcggatgcagctgccacgcctgctcgcgatggccggcacggaaaacgacctgccccgacgtgcgaaggtcgcgctggagtgacacgccctcgcgcagccaagcctcgatgacgtcgtcgatgccggccatggcacgcaacggcaggagcgcaatccgaagccggccgcggcacccgagcgcggacccactcaacaggtcgtcgtcactgcgggtgtcgatctcgatccagtcgacccgccctgccgcgctcacctgctccgcgcgtcgcgcgagctcgggctccaggcatccgccgctgagccagccgacctggctgccgttgcagaacagcaccatgtcgccggcaccggcgtaggtggagccatcggtttccagcaccannnnnnnnnnnnnnnnnnnnnnnnnnnnnnnnnnnnnnnnnnnnnnnnnnnnnnnnnnnnnnnnnntgccttcggcgaggaagcccggcgctgcggacaggtcctcggcaagatcgccgggctcccctccgcctgccgcagagtcctccagcacgggtgaggctacgggtcggtccatgcgcaacagtcagcctacgtcgggcaagccg

SEQ ID NO: 1407 - DNA, 1830 bp, Stenotrophomonas maltophilia
  marker
  misc_feature (643)..(684): n = a or g or c or t
  misc_feature (1600)..(1634): n = a or g or c or t
tgctgcccaccgcgatccgcctcagcgaaggccagatcgacaacctgctgcaggccatcgcctgcccgacgcaggtgatctatgccacgccggcgcagtcctactatcccgagccgatgcgcagcgatcgcctgcagcacctgcgggatggacggttggcggtgtttcccggcaaccatcacctgcacatggaagatccggaacagatcgcaggcgtgatcctgcgcttcttcagcaacgacaacgccggctgagcgcaggcgcccgcgcgcttcactctgcgcgtttgcggccgatacatcagttgcgggcccctgcgcccgctgcacgcgggtccggtcgggcctgcggcgtgtgtctggttctgcaaggaagtccgcatgcccgctctgctgcaccgtcacccacaggatgtggccgcggtgtcccgtctccgcgtcgctgatcgcgtcgcattccccgaattcccggcacccgccctggtcacgccctgctgcgtgcgccgcggcgtggccgttgtcgtctgctgatccaggagtcgccgatgtccattgcatccgcccgtccccccgataccgcccgcctgccgcacctgcagcagctcgcgcgcggcgctgaccgccgcctgctgatcggcagcgcnnnnnnnnnnnnnnnnnnnnnnnnnnnnnnnnnnnnnnnnnngcacggtgcaggccgccgcgttggccgccgtcgcggtgctgcccgccttgtggctggctggtccgcaggcgggccgcgccgtcgcccgcaacggcctggcgatgctgttgtcgctgcagctggccctgttgtgcgcgatcaccggcctgtcgccggcgttgccgatcgccctgctgctgggcgtgctgctgggccatcgcgatcgcctgccggtgtggctggccggtggcatcggcacgctcgcactgctggcaccgctgcagggcggtgctgcgctgtggggccgacgctgctgcaggccgcgatgctcgccggcctgaccctgttccttggccaggtcgcactgcgcctgcggcagcagaccgaagccctcggccacggcccccgccggctggccgcgctcgcgcgcgatatcgccaccggcgccgatcttggtgcacatgccgacaccagcgcctatgcgccgggttcgctggcccacgcgctggccgacaccgcacgccacgtgcaggcccagcgtggacgcgaagcggaggcacatgccgagaacgcgcagatccgccaggccctcgatgcctcgcgcacggcgatgatgattgccgacaacgaccacgtgatccgctacgtgaaccgctcggtggtggccctgctgcgcaaccagcaggcgacgttgcgccaggccttccccgatttcgacgccgagcgcctggtcggcagcagcatccatcgcttccacgccaacccggaccgcatccgcgccatcctcaacggcctgcaggtcacccacaacggcaaggtgcagatcggcccggtgcacttcgcacaggtggtcacaccggtgttcgacgcgcagggcgtgcgcctgggcttcgccgtggagtggcatgaccgcacccatgagctcgcgctggagaannnnnnnnnnnnnnnnnnnnnnnnnnnnnnnnnnngtgacctcgaccagcgcctgcaggccaccgaaggcgccagcttcctcgatggcctgaccggtggcatcaaccagctgctcgatacgttgggcagcaccgtcgacgaagtgcggcagatgctctcggcgctggccaacggcgatctcgatcggcgcatgcacggcgagtatcacggcgccttcgctgcgatccagcg

SEQ ID NO: 1408 - DNA, 1825 bp, Stenotrophomonas maltophilia
  marker
  misc_feature (1773)..(1825): n = a or g or c or t
caaaaaaagcagcacttgcgctaagctcggcctgtcatcgacctgcaatacgcggcgcgcgccggggaaggcgcgtgccgtccggggatggcaacacaggggggcgtgcccgtcagggcgcgccggcattgcgcatcgagggagggggaggcaatggcattgctgcacgccaagacggctgctggccgtcaggaaatcgaagaccgtggccggcgcctgccggcggcactgcgttcgatcctgctgatggtcgatggccatcgcgatgacaccgaactgcgtggcctgttcgaaggcctgcgcgcaccaccggatgcactggagcaattgtcagcgcagggcctgatcgaagtgatcggcggaagtgccgaggtggcaccggcgcgtggcatcagcaccggccgcgaacaggatccggcgctgtaccagcagctgtacgacgcgatgagcgaggcggtgcgccgccacctgggcctgaagggctacttcatgcagttgaagatcgaacgctgcaccgatgcgctggcactggagcgcctgtgcccggaactgctggcggcggtgggcaaggcgcgcagcccggcgctggcgcagcgctggtggcaggaaacccaggcggccgtggtgaacgctggcagcgaggtcgtgcaggcctgagccaccgcgtaaagtgatcggttcacttccccacaaggagtcccgcgtgcaggacgaccacgacgacaccgacaccccaggctgggacgcgatcaatgcggcgctggcgccgctgtatgccggccaggaaccgcgccactacggcaccgcgctgccgtacacgctgggtggccaggatccactggatggcatcagcgtgtactgggcggatgcgccggtaccgcactggcactacatcacctacggcttctccgagctgtacgccaaggagagcagcgatgccgatgccagcggttatggtttcgagctgaccttccgcctggctgccgacgccggtgagaacgccggcagcaacccgccggtgtggccgatgaacctgctgcagaacctggcgcgctacgtgttcggcagcggcaacgtgttcgaggatggtcaccacctcaacgccaacggcccgatcgcgctggagaccggcacgcggctgtgccacctggccttcatcgccgacccgcagttgccggcgcgggacaccgccaacggccatctgcagttcctgcagctggtcggcttgaccgatgaggagatggaggcggtcaagcgctggtcgacgcgcggcgtgctgcaggcgctgctgccggcgatgccgctgtggatcagcgacctgcatcgcggcaacctgctggaggatccggcactggccgcacaggtgcgggccggcagcgagcgcgagggctccagcaccggcatgttgttcatcgagaccctggactggcggcaggaggcgggcgtcaccaccctggtgctcggcgccggccaggtggccagcgtgtgcgagctgctgccattgcgcctgcgccacggcaaatcgctggaactggccagccgcgagcggcagtgggagttcattccggccgggcgcggtgaagccggcgaggtatcggccgacagcgcgcgctgggcactggacgagacgggcctgcaggccctggcgggcgtgcgtgccgagcgcggcatctacccggtggcgggggcgctgcgcatcgaagtggtgccgacctacctgcgcgatgccaagggcgaagtgatccgccagatcggctgagtgtggcgatggcnnnnnnnnnnnnnnnnnnnnnnnnnnnnnnnnnnnnnnnnnnnnnnnnnnnnn

SEQ ID NO: 1409 - DNA, 1472 bp, Stenotrophomonas maltophilia
  marker
ccactcggtcttggccgcggccttgctcttctcctgccagaagccggcggtgaaggtgtgcgcgccggtctcgaactgcaggttgagcatgccgcccagccggttgaggcgcggcgtctgcacctgttcggagaacggcgcgccgttgggcgacggcacggtcgggtcggtcagcgtggcctgggtgtggctgttggcgttgtacagctgcacgttgccgctcagcgccggactgatctggaagcgatggttgatcgaggacacgcggtcacgggtgatctggccggtgtcgtacggaatcagttcggacagctcaccgcaggtgtaggcgccgcaggacttgtccgcattctccggcgaggccacgtaccacgcccaggcgtagtccgggtagaagatgtcggccttccagcccagcttgcggatcatgtcgaaggaaatgttgttgtagccccagaccttggccttgctgtcggacaggaacacggtgaaatcgccccaggcgacgtcctgctgcagcttcaggtcgccgcgcaggaagttctgcgtgccctcgccctggtacttgtcggcggacacgcgctgcaggtcgaccagcactttcgggccatgctcgccgagctggccgctctgcccggacacggtggtgaccagcgtgttgttgctgcccacgccctgcttcacgcgcaggctgggcgtgtcctgcagctcgcgcaggcggtattccaggctgccgccgttgacgctgctggagaacacgctgaccggtgcgccaccggggctgaccgtgatcgcgccgatgccatcgggcacgcccacgttcaccacgctggtgccggtgagcgagaggaagccgttgtcgttcagcggcacgccttcgaaggtgatgcccatttcgttcatgcggaagccgcgcacgaacaggctggtggccgagatatccaggcccagcccgtcggtggcggtgtagctggcgcccggcacctgcttcagcatggccaggccgttgttgccggtgaccatcgcgtcgaggtcttccgccttgatgatgtagcggttggggccgaccacctgggtcggtgccacggccgcaccgcgcggcgtggcgatgacctgcagggcgttgagcgtggtgggcgtgtcatgcgcggcgtcgtgcgtttctgcggcgtacgcaggtgcggtgatggccgcgatgatggccagggcgaggcgcgtcgtgggtggggtgttcatggaagcagatccaaggtgcagggagagagcggcgcaggcgcacgcccagcgcgttgcagcaccggtgtcggcgccctggctggcgatgcgattgcgttgagggagtgacggcgcggtgcgcgccggtcaaaagcagacgaagacgatcatctgccgtgggattcggtggggtgatttcgacgtgcgaaattcttgcatcgcactgccgcatccgccattgcaccgtggtacagcgc

SEQ ID NO: 1410 - DNA, 1456 bp, Stenotrophomonas maltophilia
  marker
gccaggccgccagcagcgcagcgccaccggcctgcaccgccgggaagaacttgaaggtgtcctggccgtgctccaggcccaggatcaggtccgaggcggtggcggcaccgggcaggtacggcaggtcggcatcgcgcgcggccgcatacagcgccggcgttgcaccgggggacaccgcgaagcgcgcgccggcctgcttcgccgcctgcatctgcgcggcgttgagcacggtgccggcgccgatcaccgcatcgggcacggcctcgaccatggccttgatcgcatccagcgcctgcggcgtgcgcagcgtcacttcgatcaccggcaggccgccgcggaacagcgcctgggccacttcgaccgcttcattcacatcttcgggggtgtacaccggaatcaccggtgccagcttcaacagcgcgcgcaggcgcggatcagcgctggacatggtcttgctccttgcccgaccgggcatcgcggatcgccgccgggtccggcagcgcagcggcgcatgatgccacgtggctcacgaaggtgctggcagcgccctgcccgccctgcgccgggctcaggccgggtcggcctgcagtgcctggatgcggcgctggtaccagtcaccgccgagcgggtcgaacaccgccgagcgctccatcggcgcctcgtacacatgcaccgaaatcgccagggcgtcatcgctggcgttgcgcagggtgtggtactcgtgcggcggaatcaggctgccggcactgccgcagcccccgcgcagcgcggcgtggcggtggaagcgccagcgttcgccggcgcgctccagcagctcgtaacgggtgatctccagttcgcccaaccacactccctccacacaccacatggcatcgtggtcgtgcagcggcgtgccctgccctgggccccagctcatggcaatcacgctgtagccgtgttcgcggctgtggtacagcgggcgtcgcgcgtaatgatcactgaccggacggtgcacgcattcgggcaactcgatgcggctgtcggttatggcttcctgcagcgccagctgcaggtcggcggtgatgcgcccggcatcaccggaggtcatcgccgcgtcgactgcggcgatcaaccggtcgcggccacggaacggcggaaacggagaagtctgcaggtccatgcacctgactgtagcggagcatggttaagggaatgttggcgttcgcgcgcgtcgcgcccgcattcatggtgaacacgcgcggaagaacggttcagatgcagacgcagtagagcgatcacaatggaacctcgcgcagcagaacgtgtcgaacacgacacgattccgatccgctgcgacattccgcaacttcgcgcccgacgggcgcaaggctagaattctccgacttacctggttctatacatgtcagtgcgaaatatgagcgatgccgcgttgccggcatcgaaaggcaaggctgcc

SEQ ID NO: 1411 - DNA, 1055 bp, Stenotrophomonas maltophilia
  marker
  misc_feature (250)..(284): n = a or g or c or t
cccatcgttgcctcagaacgccatcgaggtactgaacatcagctgccgtggcgcgctgcgctgcagggtctggtaatcccccgagaacgacgagccggcaatggtggcggtgccgatgttgtggcggttgaacaggttgctcacgtccagccgcagctccaggccgggcaccgcgctgtccgcaccgaagcggtaggcggcataggtgttgacctgccagaagcgtcggcacgcggatgtcgttctcgtnnnnnnnnnnnnnnnnnnnnnnnnnnnnnnnnnnngcaccgaagcgccagtcaccgaaatgcgccgacaggtcgctgaccagcgagatctgcgggtagcccggctgggcgttgcccttgatcgggtacaccgtgtcgcccaccacgaaatcgctgtcgtagtacgaacgggccacggccacgccctggtagaactgcaggtggtcggtcaggtcggcggtgatgccgaggtcggcaccgatcacgtgcatcttcggcatcagccgcacggtgttgatctgcgcgaactgggtgccgatggccgccgacagcaggcggttgcggatgtcgttgtagaacacgtcgccggtgatcgtcagccggtcgaagcgatgcgacgcgcccacggtgaggttccagttcttctccgggcgcagcgtgcccgccacgcggtcgaactcttcctggtcggtgatggtccacgccgaggcggtgtagccgatgttgccgcgctgggccacgcggtagccgttcatggtgttggccaggtcgatgaaggcatcggtggattcggtcgggctccagaacagcgagacatgcggcaggaagttgctcttcgcgcgcagcgtgccgttcaccggccggtccttggcatcaccgaggccgccaccgctggtgcggaagtccacggccttgaagccaacgcccagcttcagcgtgtcgttcaacacgatgtcgtcctgcaggtagaactggcgcgagcgggtcacccagctcgatgcgttgtcggtcttgaacgcggggccatacacatcgaacggaccggtg

SEQ ID NO: 1412 - DNA, 984 bp, Stenotrophomonas maltophilia
  marker
gcgccgcgatgaaggcggcgcggaacgtggcggtctccaggccgtcggccaccacctgcaggcgcggcgcgatcgcatcgatggcatccagcgccgccatcagcaccaccacggcatagccgggcagcagcgtgcccaccagcagcagccacatggccaggccggaccgccgcaggcgaccatcgggcgcacgctcggacgcggcaaagcggcgccccagcctgcgcagccacagccgcagcgggaacatcatcaccagcgcggccagcaggcccagcaacggcgtgccccagccattggcccggataccggcgaccaacgtatcgcgcccctgctcggccaacggcgcgacgcgtgcgatatcgatcggcaggcgctcggccaccttgctccacagcgcgggcgacaacggcgaggccaccttctggcccagttcttcggtgcgttgcgcggtgcgctgctggtcgatgtcggctgccagctgctgggcacgcacggcactggccttggcctgcgctaccgacgcggccaggccgtcgcgctgtttggtgatggtgcgccgttgcgccgccagttccggcggttcggtggtgccttccgcaggcgtgcccagctgcgccagctgttcgttgagtcgatccagctgcggctgcagcgccttttccagcgcctcggcatcgcgccgtgcctgcgaggcattctcggacagcatcgccagcgtctcgatggcttctgcatcgccacgcttgcgctcgacctccttcaggctggaatcgatatccgccagctgctgcttcggcgtggggtcctcatcctgcgccagcaccggcgcggacagcaggaaggcgctgcacagcagcaggaccagccaaggcccccgtgcacggatcgatcgcaggaaagaagacacgccagccacaccggttcgcgcggaccaccgcgcctgcgcgcgactatacggcagagccggtcaaggccggatgg

SEQ ID NO: 1413 - DNA, 915 bp, Stenotrophomonas maltophilia
  marker
gctgcaggcgtcggtcgcctgttcggcgcccaggtgtcatgaccggcatgctgccgccggccaccgcactgctggccgagatggccagcctggccggctgcgcgcgcgccgaaggctatgcgtgcatcaccgcgcgccgcgaacatggcgccagctcggtggagattccgcaaccgcagttcgcgatcctgctggaaggccgcaagcaggtgcgtaccgcgcaccagtcgctggagttcgtccccggcgacatcctgctgctgacccagcgctgccgcatcgatgtggtcaacacccccgacccgcgcagtggccgctacctcagcgccatcgtgccgctgtgtgccgaagtgctggcggccgcacgcacgctgtggagcgaggagcttcccgcgccaggccaggcgatggcgcgactgccgttgatcgaccatggcgcggtgctgcgccagtggcggcaatcgctgcaggacggtcgttacagcgacgcgcggctggccctggcctcgctggtactgaccctgtgccggcagggccacggcaacctgctgctgccgcaggcaccgagcctgggcgaacagatccgcgaccgcatcgccgccgaaccggcccgcgactggcaatcgcgcgatgtggaagaacagttcgcgctgagcggcgcgaccctgcgccgtcgcctggcggccgaggacaccagcctgcgccagctgctcaccgaggcccggctggcgcatggcatgcagctgctctacacgacggacctgccgttgaagaccgtggccgcgcgcgcgggctaccggtctgcggcgagtttcagcaagcgcttcgccgagcagtacggactggctcccacagacatttgagggggttcggcagggctaagcgccctgcacccgcaagaggaaaaaacaacgg

SEQ ID NO: 1414 - DNA, 761 bp, Stenotrophomonas maltophilia
  marker
acgcgcgccggcctcggcaaagccggccagcatcgccccgcccttgccctggttgatgtccaggcgcagcaggtcgacgccctggcgctgtgccagcgaacgcagcaccgccgcgcacgcttcatgcgagccatcgtcgaccagcaggcacggcaggccggcggcctgcacgccgtcgaccaccgccgcgatggcgtgctcgtggtcgtagacgggaatcaccaccagtggcgcgaacgcggcaccggcaacggccgggtcagtccgcatcggcgaaaaccaccttgccgctggcatgcacaccgtggctggaggtgtagcggaaggccagcacgttgcgcgcggcatcccagtccagctgcagggtcagctcatcgcccgggcgggccacgtgctggaacttcaccgcatccatgcgcaggaacgctgccggcatcgcaaacgcctggcggccaaaacgcaccgcccagtccagctgcgccacgccgggcaggatcgccgcctgcgggaagtggccctggaacggccgcagcgccgggtccagggtcatgcgcagcgtggcgctggcagcatcgcggtgatcccagaccggcaccggcatcagcggctggaacagcgccgccagtgccgcctgggtgaccttgccctgtgcattgatcggcagcgcctgcaccaggcgccagcggcgcggccgggtgaccgcgtcatgcgcctgtgccaggcgggcgccaaggcgctggcccagcgcgcggcgcgcggcg

SEQ ID NO: 1415 - DNA, 729 bp, Stenotrophomonas maltophilia
  marker
  misc_feature (709)..(729): n = a or g or c or t
ctgcagtagctcaggtgctcgctgtacagcggcacgcggtgcttttcgaggaaccggccgacctgctccagcagctgggtatccagcggtgcactgccgcccagcgacagcgacaggccgtggcagctcagcggatggcgctgtgccagttcggccagggcatcaccggccgggccgccgacatggatccagttctccggcgcgcattcgaggaagtcgaagtcgcctgccggggcgtcacgcagatcctgcagcagcgcccggcgcaggcccaacccggcggccgccgcacgaagcggcgaccgcgggtggacgaggctggcgcggacgtcagtgcttgccaccgcacttgccttcgccgcacttgccttcagccgacttcgtgtcgccggccttggccttggcgcccgctaaagcgccggcagccttgcccttgtcggcaccgcacttgccttcgccgctcttgccgtcggcaccacacttgccttcggcgtgcttggtcgcgtcagcggccatcttgttatcggcggccttggcatcggtgctggccttggctgcctggccggccaccaggtagccctgggcgaggtcgctcatgctcagcgccgaggcgctggcggtcatgcccaggccggcggccagggcggtagcggtcagcagggacagggtcttgttggaactgctcatcggtcttactcctgggtggtgnnnnnnnnnnnnnnnnnnnnn

SEQ ID NO: 1416 - DNA, 719 bp, Stenotrophomonas maltophilia
  marker
ggtagatccgcccctcgttgcgggtgtacttgtggtcgagcgtgtaatcacggtcgagcaggtcggcggaagagggcgaagtgagttgcgcggtactggtcatggctggcccggtcaggatcggctggcaccggccgcgtgcaggcacgcggcgggaaaggcgcgaattgtagcagcggggccgttcacggcccggcactcgcgccggcggccatgctggggttaggatcggggagagagagggaggctgcggtaatgcggcctggggagaagggatgtcagttgcaggaaagatcctggccagcgtgctgctggtctcgggagcggccacggcgtgggccgcgccggcggtgccggcaccacaggagttctacttcgacagcgacctggccgccgtgccgatggtggcgatccagggcgacggcgatgagctggtcacccagctggtcaagctgcgcgagcgcggccggcgcgcggtggaggccaccgtgcagctggcgtcggtggccattgcccagggccgcaccgagctggccgaacagctgtatggcgaagccctgaaggaggcgccggcacagagcagcctgggccgcagcgtgcgctggaactacggctgggacctgctgcgccagggccagcccgaggcggccctggagcaatggcaggccgcggccggtggttcgctgagcaagcccagctgggtgccacccacctacgcg

SEQ ID NO: 1417 - DNA, 698 bp, Stenotrophomonas maltophilia
  marker
cagcagcggcgacaggcgaccgccgcccagcgcgccgaacgaaccccacatgctctgcagggcggccggcgaattggccacggcgcggaacatggccggggtggcgccgaaggcggcgtggacctggcccagcagggcctggcggtcggcggtggtgttggcggcatcgatcagggggacacgggacatggtggatctccttgggaaagcgcccgggattggacgacccgctcatcctaggtagactccatggacgaattatgcgcaatcagccacatatgttgtccattcgtccatgagcgtgtccgccgacacccccgcgcccgaccgcctctcctccctgctggaacgcttccgggtgcaggccgcgctgttccacagcggtccgctgtgcgggcgccatgtcttcgagccgcagcccggtcgtgcgttcctgcacatcctgcgccagggtgaaatggaggtccgtcatcccgatggcgatatcgcgctgccccggttgaagatcgacgcacccagcctgctgctgtatccgcagccgctgcaccatgtgttcttcaacgcgccgctggatggcccggatttcacctgcgccacgctggacttcgatggcggcgcgcgcaatccgatcgtgcagtcgctgccaccggtgatggtggtgccgctggccgcgatcaccgaactggatgacaccctgc

SEQ ID NO: 1418 - DNA, 697 bp, Stenotrophomonas maltophilia
  marker
cgctgctgcaggttgacctgctgcttgctggccagcgggcggtagtccaggtcgagcagatcggccgccagcacatgggcggaaccggccaggccggccaccagcagggtcagcagggacaggccgcgcaggcggcgcggcataacggtcggcaggggcatcgagagcagtccgcagtagccattaaacacagggccggccggtagcggccgggaatcggccgaactatagcaccgggctccgttgccccttgttgcggcgggcgccggcggctttgcgcggcgtggcctttcccggcaggacccaccagcaacggcgcagtaatgacatagcatggacaacgctgaatggaaggcaggcctgggtcggcccgcacgacaattttatttcccttttcaatcaaatagataaggggatatttcagcgatttgaccacccctgccatcagttggggacggcaaggggttgcacgtaggcgtgccggtgttatagttgcatacaacaccagtcacctgagacagggggaagccatgaacgcccggatccgtcgcaacctcaccgcacccgcggccgctgccgtttcgaccctgatcgtgctggcctggctggccatgccaaccgcccccgcctccgccgacagtgcgcaggatgcatccgtttcaccggccgggaacgccgatccctccccccctccccc

SEQ ID NO: 1419 - DNA, 689 bp, Stenotrophomonas maltophilia
  marker
tagctcagcgtgtccaggcagccggcatccagcgccttggcatcggtcttgtcgatgaactggccgagcaggcgcggcatgcagccggcggtcagcgtgccgtggccctggccacgggcgaccagcgcgcggccattgggcaggcccttgaggacctgctcggcatagcgcggcggggtcaccgggtccagttcaccggacagcagcagcgccggtacgtcgctgcgcagcggcacggcattggttgccggcgccggacggtgcggccacaccgggcaggcggcgaagaaggcgctggccacgtcgttgccgaacagccgctcggggtcctcggccggcgcctggtagcgcggcgcatcctcgctgcagatcaccgaccactgcatgccgcggttgatctggaaatccatgctgcggttcgcaccgcgcgccagcgatgccagcggtgcgtagcggccgtgcgcggcttcatccagcaccagcggcagcagcgaggaatactgcggcacgtaggagaaggcgaaggccaggccgaccacgctgtccggcgtcaggacatcctgccgcggtgcgttggtgccgggatcgcgatactcgaccgagaccggtgcacggcgcagggtctcgaccacgctgcgcagctgcgcgcgggtatcggtcgggaagcgcttgctgcaggcggcatcctt

SEQ ID NO: 1420 - DNA, 667 bp, Stenotrophomonas maltophilia
  marker
tcagtaatcccccctcgtgcacaatggggccgaccccgcctggacaccgtcctgatgtcgagcaagccgtattcagaagcctgcgagcgcaaccgcgaaccgatcgccgccgcactcgacccgtggatgggcgaccgccaccgggtgctggagatcggcagtggcaccggccagcatgcggccttcttcgccgagcgctggccgtggctgcgctggcagcccagcgatcatccggaccatctgcccggcatcgaggcctggcgtgcggaggccgcgctgctgaacctgctgccgccggtggcgctgcaggtggaactgccaccggcgcccgggctcagcctgccacagggcagcacgttcgatgccgcgttcagcgccaacacgctgcacatcatgagctgggagcacgtgcaggcgttgttcgccgcgctgccatcggtgctgcgccacggtgcgctgctggcggtgtacggcccgttcaactacggcggccgctacaccagcgacagcaacgcgcagttcgatgcgtggctgaaggcgcgcgacccgcgcagcggcatccgcgatagcgaagcggtgcaggcgctggccgccgacaacggcttcacccgcctgggggacgtggcgatgccggccaacaaccgcctgctgctgtggcggttggggt

SEQ ID NO: 1421 - DNA, 629 bp, Stenotrophomonas maltophilia
  marker
gccagcggatggcgcagggtcacgccggcggcgcgtgcctggtgatcctcgctgcccgatgcctgcgggaacagctgcgcgaacaacggtgccagcgctgccatgtccggtgccggcagcggatgccggccgatgcgctgcagcccggccgccagctgccgctcgtactcgcgatagcggcgcaggtagagcaggccgttctccagcaccagcggcgcatcctcggcgatggcgtcggcctgctccggcgtcgccacccacggcgatgcgcgcagctgcgccagccagtcctgcgcggcaggccactcgggcacgccttccagcaaccgctgcggctgcgccggatcgaacgcggcgtggccctgcgacaccgccagcgaggccagcgcggccgccagcgccacgctctccggcgtgtcgccgcgcagccgctgcaggctggtcgccaacgcgtggtcgagggtgcgcagcaggcccttctggtgcagttccttcagcaggctcatgcgctggccccacgggcacgtgcggccagttcggcctgggcctgttcgccaccggcgaacaacgcatccagtgcatccaccagcgccaacgggaagcggtccacatgcacaccgttgccggcg

SEQ ID NO: 1422 - DNA, 628 bp, Stenotrophomonas maltophilia
  marker
cggcacgcgctcgccaccggcgcgcaaggcgtcgccagcgccggccagatcggccacgcggaaggtactgtcggtcatggtggtgaaactccaggctcgcacgcgcgttggcggtcgatgccatggcggccctgcacgcgataccggcgcacggggcgaacagggtggattgccagggcacgggaacgataggtcgtcggcatctgcctgcgcctgcggccggtatccgggccgtgggggcgacctgcgtccgcacgatggcggccgcgtcgacacggcaagccatcaggggcgggccgcgggacgtttgctgcatgtccggcggcggcggctgaccgggagtgacggccacaacatagtggggatatcccgaactcgtcaacacaagatgcggtaatcacgacatgtcgcgacgatcagtcgcaggatgccgtgttgcacctgcggcgccttgtcgacagcgcctgcgtccccagttcggtacaacatcaactttccccggaacaccgcccatgcgcgctgcccagtacccctccttcggcaacccggccgacgtccttgccattgccgatgccgccgctgcccgagcccggccccggcgaggtgcgcatccgcaccgtgctggcct

SEQ ID NO: 1423 - DNA, 604 bp, Stenotrophomonas maltophilia
  marker
agtgcatttccgcatcggattcgtggccggcagcgatccggcggcgatcacccgggcggccgccgacgtggacgccagcggcatcgggcgggtgctgggctgaaaaaattcatccacaggcggtgtggatggtttctgagcaaacgtgtggataaccctgcgcagcccttgtcaggcaaggctgtcaagatgcttggtcaaaaattgatcacgcctttttgtagcgtcgagccatgctcgactgcccttggcaaagagcgtgtcgaccaaggtcgacacctaccagagcggagcgatacgaaatccggtagcgccgggccatgcccggcgaacctcagatcgtcagccgcagttcaccgccgctggtggtgaactcgcggccattgcgaaccagatgacgtccgtcatccagctcgtagcgcggcgtggcttcggagtgatgcccgctgccattcgcctcgggcttgaactcgatgatgatgtggctttcgccattgctgtcgacggcggggaactgacggaacgacatcgtgcacctccattcagcggatgctgctgatgcgcggccagcttggtccggccgatgttagccggccgtcatcaa

SEQ ID NO: 1424 - DNA, 601 bp, Stenotrophomonas maltophilia
  marker
cagggcaataccgtggccaacaccgatggcatctggatgatgcagcagcccagcgcgcgcttcccgcacggtgcgctgtatgcagtgcatgacgaccagggcgtggtggcgttcgactgggagagcatcgccaagcagctggcgctgccgctggagtgtggcgcatgagcgggcagtgcgtgatgcgcgcgctggcgctgggcctgctgctggcgttgccgtcgctgtcgttcgcggcggccgaaccgaatacccaggtgccggcgggcagccgccactacgcagcgacgacggtgccggaccgcatcgtcgcctcgccggcggccgatcccagccatgggttcgccgtggcctggcgtaccgacggcagcgtgcaggcgccgctgctggagattgcgctggccggtgattcgccggccatcgagggcatccgccaggtgcgtgcgacgacccgcgcgctgcagaccgagaacgggctgtcgcaccaccatcgcgctgacatcagcggcctgcagccggatacccagtacgtctaccgcgtgcagggcaatggcagctggagcgcctggaaccagctgcgcacgctggccggcgccgacca

SEQ ID NO: 1425 - DNA, 595 bp, Stenotrophomonas maltophilia
  marker
ctgcatgtcggcaccggccgagaaggaggcgccgtggccggccaccaccacggcgcggaccgaatcatcgcggccggcggcctccagtgcggcggtcagccgggcgatcaggctggcgtcaaaggcgttgtgcagctccggccggttcagccagagggtgaggacggcgccactgcgctcgatctgcaaagcatcgttcatgggattccagggtcactccatacctgtatggatcatagcgggccattggtcatgggccatgacgcgacgcgggaatgttagaatcgagaaccatttacatccagcagagaacacgctagatgacgctgtccgaactgccgctgcacacctcggccgtggtcgagtccgtgcaggacctgcatgccaacgatgccatcgcccgtcgcctgcgcgagctgggtttcgtgaagggcgaggaagtgcgcctggtggccaagggcccggtgggcggcgagccgctgctggtgcaggtcgggttcacccggttcgcgctgcggatcagtgaagccaagcgggtcgtggtcgacgccgccagccaggaacgacgtgcatgactgctactgccaccaccgcc

SEQ ID NO: 1426 - DNA, 583 bp, Stenotrophomonas maltophilia
  marker
cagcagcagcgacggcaggccgaacagcaccccgcgcaacagccacgccagcagcgccatcagcaacagcggcggcagcagcgccaaggcaacgccggccggtccctgccaggccttgccaccacgcgcatccagccagcccagccaacgccggaaaccgtcgaaacggcgcagcgaggcagcagcggccggagcaacatggcccagggccagtgccaccagcacggcggccagagtggtgaacatggcaggtctccctacgaaacagaacgctcggcgccgctaccttacctgtcgcagcggcgccctccgcggtgacccgcactgtaacccgggccgtgttcaggtggcggcaatgcaatcgccaaaaaaaaaaaaccagccggcccgcctcagcccttctgctgccggtaccagtgctcgatcaggccgcgcgaaatcgagatcggcggcgacaggcggatgccctggccatcgtcctccacatcgcgcgccagtgccgcgccgacctcgtcggcactgaaccagcgcgcgtcttccagctcgccgtccacggtcggcaggtcatcctgcgcctgtgcac

SEQ ID NO: 1427 - DNA, 583 bp, Stenotrophomonas maltophilia
  marker
  misc_feature (563)..(583): n = a or g or c or t
gtgacgctgcgtccgttccgcgtgggcgatgtggtcaccgtggccggacagaccggcacggtgcgcgaagtgcgcatcttccagaccgtcatcaccggtgccgacaaccagcacaccaccattccgaacacgctgatcaccgccgcgccgatcatcaacctcaccgccgagccgacgcgccgcgtcgaactggtgatcggcatcggctacgaagacaacatccagctggcgcgcgacaccgcgctggcgctgatgaaggccgacccgcgcgtgctgcagacaccggcaccggacgtggtggtgtacgaactgggcgcgcacgccatcaacctcggcatccgctgctacgtgaagtcggccgactggttcggcaccaaggtcacgctgctggagcagctgaagctgggcttcgacaaggccggcatcaacatcccgtacccgcagcaggacatgcacctgtacctgcatggcaaggatggcggcgtggtcgaggccgacgcgctggtgcgcgacaagccctgatccatgcacgggaatgccggccagcggccggcactaccccnnnnnnnnnnnnnnnnnnnnn

SEQ ID NO: 1428 - DNA, 573 bp, Stenotrophomonas maltophilia
  marker
tgcccccgcccgcggcgaacagatgatcgcctgcgtggaaaacggcctggtggaactgccagtggccgtgactcaggccgggcgaatgcccagctgcggcatcaactggaaatcaggcgtgtcatcttcacgccgccgcggcaaggcctggattgccgccagcatctcctgcgcgcaggcgcggatgcgtgcgtggtgctccggcgatgcatggctgatcaggctgccgacatggaactcgaacacatcctccagtacgtcgggctggtcctcgtgcagcatctgcagcagtccgcgcagcttgcagatttccgattccagctcttcgaccgcgaacaacatggcgtcctcctcttcaacaacaggcggcacgtccgggccgcaacaggccgcaacggcagcgccgcccgggccacgcgcgatgttgatcacggaaaggaaaacgggcgacgcgacaatcgcgtgcaacctacttctcgcatatccgcggtgaggcaaccgttaattcacgtgacggcgcagcttcacgcggttgccgtgatcgcgtgtgatgcgaggtatttcggccgcagt

SEQ ID NO: 1429 - DNA, 572 bp, Stenotrophomonas maltophilia
  marker
  misc_feature (518)..(535): n = a or g or c or t
  misc_feature (554)..(572): n = a or g or c or t
gcctgggtcagcaccgcgaccaccacgttgctcagcacgaaggccagcacgtagccgcgccaggacatcgcgcgcgacggatcgacgccgaacaccttgtacagcggcttctcgatccagtggaacagcacgtcgaccttcatcggcgtgccgcgcatcacgcgcgccaggtacaggcccagcggccacgccagcagcaggctggcggcaagaatcacaagcatctcagtcatggccggctccgctcagaacgactcgggccgcagcacgacataaagaagataggcggcggcgaccagcaccagcacgccacacaacaacgacagccagggggacattgcaatagcgtcctggtggaacccctccacctcaggccgccatcgtcgtcctgccccccataaacgcactacgcgccggaccgggccgacgcgtaaagagtgcataaattccgtgggccaacccgtaaccaggccccgggtagctgccgggccatgcccatgctcggctgcgctttcccnnnnnnnnnnnnnnnnnngcgtcagcccgccgggacnnnnnnnnnnnnnnnnnnn

SEQ ID NO: 1430 - DNA, 561 bp, Stenotrophomonas maltophilia
  marker
gttggtctgcgcggcagcggcggccttggcctgcatttcggcctgcttgctgcccatgaaggcctggatggtggcggtcgcgtcagcttccgtcatcttcggctggcccttgctcaggccggtgctgatcgcgtcaaacagcgaggcgacatcgatgtcgtccttcagctgtgccagcgacgggccgaccgagtaggaaccgatcatctgcgacaccttgacgcggtcgaccttcggcggctgcgaacccggcgccatgcccggcacctgctggccgctgcgggccatcacgacctggcgcagcgcggcatcggtggccttggcctgttcctgggtgatctgcggctgcaggccttcgaacgaacgctccacggcggtgcgcagcgcggccacgtcgatctcatcggcgatcggggtgaacgacttggccacgtccaggccgatggcgtagccgagcttctgcttgggggaattcaaggttgcggtctccttggcggctgcgggggcagccggttgttgcgacagagcgacacccgaagtgcccatcgccagaatcagaac

SEQ ID NO: 1431 - DNA, 535 bp, Stenotrophomonas maltophilia
  marker
gctggcacgagggcgcggtgacggtgtcgtgccgcgctggcagggaggccagctgccgctgtcgatgccactcggccgtgagctggagtgggtgctgtccggcgccgacgacagtgccgaatcacgctggttgtcaccgttgctggcactgcagcagcagctgtcggcgcttcccggcccagaccacctgctggtggaagaggtgcggcgccgcgaaggccagttcctgttcgtctacccctttgccggccgccacgtgcacgaggcactggccgcgctgttggcactgcgctgcacccgccagcaacgcaacagcatcggctatgcggtgaacgatcatggcctggtgctggcaccggcgcaggcgatcgatctggatgcggcgcaatggcgtgcgttgttcaccaccgatcagctgctggacgatctgcgcgccgcagtgaacctgggcgagctggcgcggcgccagttccgtggcatcgcacgcgtagcaggcctgctggtgcccagcctgcccggcggcatgccgcgatcg

SEQ ID NO: 1432 - DNA, 510 bp, Stenotrophomonas maltophilia
  marker
ctggcgcagcgcggtatcgacgatgaccgccacttcgctggccgcctggccggggccaccggccaggaagaacaccgggtcgggctggctggagccgctgctgcccgattccagccaggcgatgcgcaggccgatccggcggccatcgggctgggcccggtcctccggcacctgcagggtggcgcactgcgcttccacgttggcgctggcgccttcggtggacagcgtgcagggctggaagtcgatcgtgccgaaacggcggctgggtgcatcgctggcgccttcggcgccgggtggcggtgactggctgcaaccggcaagcatcaggctggccaacatcccggccaacgcgaggtggtgtctttgcatcgtgctcgtttcccctggaggacgttcctggcaaccacgacgggctgccgcggaagatgtgactcaacttacacgggcagcggcgtcgtcggcgatgggcagacgcgaaatctccgccggcgtggcgcagaccaggcgatc

SEQ ID NO: 1433 - DNA, 502 bp, Stenotrophomonas maltophilia
  marker
ggcgcgggcgcgtggcgtgcatgtggccaacctggtgcgcaatgccgatgcggtcgcgcagctgcaggcgctgggcatcgatcatgtgttcgacacctcggtggacggctggaaggatcgcgtgcgtgaggcgaccggcgaagcacaggccgcggccgcggtggattccatcggcggcgacgccagcggtgacctggtcgacctgctcggccaccacggcaccctggtgtcgttcggggtgatgagcggcgaaccgatgcgcattcccgccggcggcctgatctacaaggaagccacggtgaagggcttctggggcagcaaggtcagccaggcgatggcggtggaggacaagcgccggctggttggcgaactgctgaagcgtgcggcgagcggcgaactgaccctgccggtggagcagatcttcgcactggacgacatcgcccaggcagcgaaggctggcgccggttcgggccgcaacggcaaggtgctgctgcggccttga

SEQ ID NO: 1434 - DNA, 487 bp, Stenotrophomonas maltophilia
  marker
gccccttcggcactgcccagccaatgttcgcgcgcgcgcgaagcggctgcgaaatgctcatccagaaacaactggcggaactgcgcgtcgaacgcgtcgtcgcgggcgaaccacttcgcagggcccgcctccttccagaattccaccacttgcgcggcaacgtccatcacctactccccagggccggcgcgccgcgccaggccatcatcatcattcgtcgaagcgcaggtggcggaccgacttgccgttgcgccggataagcttaagcgcctcgataccgatctggatatggttttccacgaactgggagctgaccttggcatcggaggcctcggtcttgaccccatcggggatcatcggctggtccgacaccagcagcagcgcaccgctggggatgtggttggcgaagccggcggcgaacacggtggcggtttccatgtcgatggccatgcagcgcatcgcccgcagccgctccttgaaggcctcg

SEQ ID NO: 1435 - DNA, 481 bp, Stenotrophomonas maltophilia
  marker
cgccaggcggccggtttcacgtaccgcgacggtcaccgagtccagcggcccgtagcgcagcagggtgtcgtagggggggctgtaggtggtggggaagccgaacgccgatctgccagaccgggttgcccttgccgtccttgccctggcgtggcgtgacttccagcgccaggcgctcaccgccacgcaggacctcgatcatgcccgggccgccggcacggcccagggcctggatctcgccgatcacctggtcgacgctgtcgatgcgctggccgtcgatggccacgatcaggtcgcccggctgcagttgcccggccaccaccgaatccgcggtgagcgactcgaccagcgccggctgcagccacgactgccagtacaggccggccaggatcggcacccgtcgttcatcgaaaccggccggcagctgcgacagcggcagggtgcgcacgcgcacctggtcggccgggtccagcacctccagctt

SEQ ID NO: 1436 - DNA, 476 bp, Stenotrophomonas maltophilia
  marker
ctccaaccgctcgaacgcgtggctgagcagcatcagcttggtctcggtgttgaccccggtgcgctgcgccgactcgccataccaggtgtaaccgatactcaggcgcggcacgtccgcttgcagatcgtagtagcgggtggtgccgacaatctggtcgttggcatcgaacaccacgaacggcagcaccttgccttcggcctgcgcctgcagcgctgcctgcacgtagccggccatggtcttcgcatcgggcacctgggtgtaccagagcctggacaggccgcgccatcgccaagcgcgccgcgcaggccatcgatatgccccatctgcagcggctccagccgcgcatgggtgcccgccagcgtagggaccttggtccaaaaatcagcatggttcatgtgttcagccctgcaggctcggcgcgcgccgggcgcaatggtcgacataggtcttgatgcggtcgatgccatcggcaccga

SEQ ID NO: 1437 - DNA, 475 bp, Stenotrophomonas maltophilia
  marker
caagctgaaggccaacggctgatgccgtgataaaaaagggctgacgtcgtgttcatcggcgtcggcccatactgctgctgcatgcaagccccgcctctgcggggcttgcgtgtttctggcgtccacgcacgccctgccccacgcagacattccccctcagcaaaaaaaggacttccgcatgatcgccgccgccgcacaaaccgcccccgccgcaacgccctggttccactcgctcgactgggaacgcctgctggaaacctacggcgtgccgttgctggccgcgatcgtggtgctgctggtcggcctgtgggtggcacgacgcctgtccaatgcgatgccgcgcgccaccgcgcgcatgggtgtggacccgatgctgggcagcttcctgcgcaacgtggtgtatgccgcctcgctggtgatcgtggtggtgctggccatcggcacgctgggcgtgcagatcaccccgctgctggcc

SEQ ID NO: 1438 - DNA, 474 bp, Stenotrophomonas maltophilia
  marker
gtttccgcggcgcgggtcagttccagcgtgttgaggaattccaccgcgtcggcggtgttgtagttcgccagcggtgcggccagtgcggcggcatcggccaccgggcgcagcaattgcttctggttcatcggttttgccttgtgggggtgcgacctcgcgcaacgccaacgcaggcaaaccgtcccgatgtcaggcggtggccatcgctggcgtcgaacgaggtcgacttctactgtcgctggacatgggttggggactccgggatgcgtgtgccgacggacgcgccgccagcggcgggcagtctggacccgtggaccatgcaggtcaacccggtcgccccgcggcgaaaccctgcccggcaggttgttctcgtgcgtacacaggccggcgcgcataatggcgtggtggcgctcgccacgcccttccccacccgaacggacgcacagcggaactcccccgatgaccaggtattcc

SEQ ID NO: 1439 - DNA, 468 bp, Stenotrophomonas maltophilia
  marker
ctggcgaccttcgctgcggacgatctgcgcaagccgtacgggctgtgggtcgaccgccgtgccgatggctacagcgtctacgtcaccgactcctgggacaacggcgaggatgcgcagggccgtgacatcctgccgccgctggccgagctggacaagcgcgtgcgccagtaccaggtgacccgcgacggcgcgaaggtcgaggcgaagctggtggccagcatcggcgataccaccgaggcgggtgcgctgcgcgtggtcgagtcgatctggggcgaccccgagaacgatcgcctgctgatcgccgaagaggacgagagctacgccagcgagttcaaggtctacaccctggccggacgcttcaccggcaccaccttcggccgcgacgtgttcaaggcgcaggccgaaggcgtgaccctgcgcacctgcggcaaggacggctggtggatcaccaccgaacagggcaagcag

SEQ ID NO: 1440 - DNA, 458 bp, Stenotrophomonas maltophilia
  marker
ctgcctgttcatccctggaagccgcaagttgcggtaacggttacatttttgcgtgccacccaggggacaatgacgtccgcgtgatgttgcaccgcagtattgaactttggtcgcaggcagcggaactttcgccgagatgcgccggtccgatctttcgacctgcctgcagcaacctcgtcgacgctccgccccgcaggtcccacgatggccccgaagcccggctccggggccatcatttttgcatcgtcgcgacagcgctgaaccgtgcacatgccgtggaccatacgttcacggatggtggacggcgcctgtccggcacagtggtcttcattctgatgaaccactgcaaggactcttcgatgcgccccgtacccaccctgctcgccctctccctgctcgctgccggcgcctcgttcgccaatgccgcccacgccgccgaaggcgatgaccgcttcgcc

SEQ ID NO: 1441 - DNA, 456 bp, Stenotrophomonas maltophilia
  marker
aagacccgcgagaagctggatgcgctggaaaccgccgtgcgcgagctggaagggcgcggcgccgcagaatgaaaaaaggaggcgcaccgcgcctcccgtttacagattatttcccggatggggccttgcagcaaggcccaccgggcgccctagactcgccggcctgtcgatccggcagcacagagaggggcagtgccgatggcgcaggacaccgaatggacacccgtttcgcatgacacctgcgaccaggtcgccgggccgttctatcacggcacccgcgctgacctggcggtgggcgagctgctgagcgcgggcttccgctccaactatcgcgacagcgtggtgatgaaccacatctacttcaccacgattgccaagggcgccgggttggctgcggagatggcccggggtgaagggcgaccgcgcgtgtatgtggtggagccgaccgggccgttc

SEQ ID NO: 1442 - DNA, 448 bp, Stenotrophomonas maltophilia
  marker
gctcggacggtcgacgctcagccccatcaggtcaccgcaactgtccttgccgtgggtgtcggcctgcagcgcgcggaacccggcactggccggatcgaagcggtacaccgccaccgcttcgttgaccatgcccaccgaggcgcgcgcgaccaattccgggtagccatcgaaatcgacatcttcgagcgaccatcgcgaattgccgtcggcatccgccgcgccctcaagcgtctggcgcttgcccgacggtgacagctgcacggcgatgctgccgtcctgctgcggatcggcatgcgcctgcacatgcgcggccacctggaaccgcagcgtttcgccgtcgtccccacgcgcctgcgccgtcggtgccagcacgcctgccagcaccaggcccagcacgcattccctgtagttcatcattgctccctgcggcaccgcggcggcaccttca

SEQ ID NO: 1443 - DNA, 448 bp, Stenotrophomonas maltophilia
  marker
gttcatccgtcgggcgctgcccggcgaacgtgagacacgttcagcctaaagtagcgccgactgcggccgacacggtagattcaccagatcgatccgcgggaatccgggtaccgcctgccgatgtcagctgtcttttccatcactcctgccgacaagaaccgcctggccgccagcgacctgccaccgcgggtgcgtgagctgctgggcgcgttgatcggcctgtgccggcaaacgctggccgcgcccctgatcctgaccgtcgaagcgctggagcagaccctgctgcacgacgccgaccgcgcacgcaatccgcagcagcaggccgacctgatggcccagcgtggccagctgcacgccttcgccggccatttcgccgaccgcatgctcgatgccgtggccgaagcgctggcgggcctgcgcgagccgtccaccgaaaaaaaaaaaaaaa

SEQ ID NO: 1444 - DNA, 436 bp, Stenotrophomonas maltophilia
  marker
gctctccacgctgccgaccggggtacggccgacctgcaggatcaccatgcccggggacaggccggcatcacgcgccgcctggcccttgactccggtgatgcgcacgccttcgttgccatccaggccgaactgcttgcgctgcggtgcggtcaggtcgctcacgtccaggcccagcagcgcattggcgccggcctgcggtgccgcatcgggcctggcggcagacgccgcacgggcattgccctgaccgtcttcgctcagcgccgtgagcgtggcgctgaggtcgcgcggcttgccgtcgcggatcacccccagcgtgacccggctgcccggtgccatcgcaccgatcagcggcggcaggtcggaccagctgttgaccgggctgccgttgaccgaacgcaccacgtcgccgatctgcacaccggccttctctgcggca

SEQ ID NO: 1445 - DNA, 435 bp, Stenotrophomonas maltophilia
  marker
aaggaaaagaccgagttcacctccggctccagcgccctgtggtggggcaccaagtcggtcatgggcggcttctacgaccagggcctgggcaaggtcgtgaacctgcagcgcgccttcgcgccggaagaaatcggcccgggcgactacaacaacatcctgaactccgatgagagccgcgcctaccaggtcaccctgggcggcaagggcatggtcggcgactgggattacagcgccagcttcacccgcggcgagtaccgcctggaccagaaccgcttcgtgcgctggaaggacaagatcgaagacttcttcggccagaccgtgctgggcccgcgcctgggcaccaccaccgacccgaaggaaaaaaaaaatggtttcggcatctacaacccgaactacgctgccttctactcgccgatcaccccggaccagttcgcc

SEQ ID NO: 1446 - DNA, 434 bp, Stenotrophomonas maltophilia
  marker
cggctgcgcagggcgaacagggtgtaggtctcgccagcgtagtcgagttggccataggccaccttgtcgaagcgcgaggccagcgcctcgatgcgcggcagcacctcctcgtcatagcgacgcaggcgctgctggcggccacgccacgcctcccgttccgccgctccccacggctggccaggggttccgacggggtagaaagcggcttgggacatggcggatctcagcgagtcaggaagcaatcacccactttaccaccgggccatcggcatgaaccggagacgcattccattggcgaatggaatcagcaataattctcatttacgaccttccacaacctgcaccgatgcccatccacgccctgcaaccggcccgcctgcccctggccgccgccctcgccctgtgcctgcttccggccgccagcgccttcgccc

SEQ ID NO: 1447 - DNA, 427 bp, Stenotrophomonas maltophilia
  marker
atgcggcgggcgtcagccatgggctgatgcgtgggctgtccgatgcgcggctggcacgtacgctggtggcgatgcaccaggcgccgcaggacgaatggacgctgccgcgcatggccgcgaccgccggcatgtcgcgcagcgcgttcgcggccgtgttcaaggaggtgatgcaggcgacgccggccagctatctgctggactggcggctgagcctggcctgcgcgcagctgcgggcaggcgtggcggtcaagcaggtggcgatcgaggtggggtttgccgataccgcatcgttgtcgaaggcgttccgcaagcggttgggggcgtcgccgagggcgtggctggcggcgaccgcagcgcaggctgggtaaatgcgtgaggggtagagtcgaccgctggtcgactatcgcgcgaagcgcgggattttcgt

SEQ ID NO: 1448 - DNA, 422 bp, Stenotrophomonas maltophilia
  marker
ctcggcgcgcaccattccgaccatcgtccgcgaggcgttccgtgtcgcccaggaagagcgcccgggcccggtgctgctggagctgcccgaagacatcgcggccgatgaggtcgagggcgtggcgctgattccgccgcacgcggtggatcgtcccattgccagtccggaggcgctggatcgggcggcggagatcatccgcaatgccaagcgcccgctgctgatgatcgcctcggcggcgtcgcggccgcagtccagcgaagcgctgtcggcgttcgtgttgcgcgccggcattccgttcttcaccacgcagatgggcaagggcgcggtggccggtggttcgggcctgtacatgggcaccgcggcgctgaccgagcgcgattacgtgcacatggcgatcgaccaggccgacgtgatcgtgacca

SEQ ID NO: 1449 - DNA, 406 bp, Stenotrophomonas maltophilia
  marker
aggacatgccgcgggcgtagctgaaagcggtcgcatcggccatcgaccacagcagcgcggcctggcgcaggtcgagccggcgtggtgcgctgatggtgacgctggcggcttcaaccgagaaccacgcctgctccccgcgcaggccgaggaagatcgcggcaccgggaccgccgccgatgtcggcgccggtcagcgccagcggctggtcgtcatcgccggtgaaggcgctgccgtcctgatcgagcacgagaatgcgcgcgcccggccacaggcgcgccagtgcatcggcatcttcgcgcagggcatcggcgcgctccagcggttcgcccacgaaggcgaaaccggaaagcggcgaaggagtattgggcatcctgcaagcgtgccgccaatcgatgcgggtggcaag

SEQ ID NO: 1450 - DNA, 405 bp, Stenotrophomonas maltophilia
  marker
ctgcgcatcgtgcgtgcgcaggcgcgggcgatcgcggttggcatcgaagccgagccggtacagctcgtcaccggccagcgcgccgtacaccgccagccgcggcgcgaagctgccggcgccttcgcgctgcaccgcctccatcaacgccacatcatcggtccacagctggcggcccgcgaacggcggcggctggttcagcaccacatgggtttcgtacggcgcattgctgctgaagctgggtccactcatccggtccatcctggcggcaagaggtgtgcggtccgattgtgccgcatcgcccgccaagcccgtgttcaggccgattctcaccctgtgcacgaagcggccggccacagtgatcgcatggcaggcaatgacgatctggtggtcctgcgcccggagggg

SEQ ID NO: 1451 - DNA, 402 bp, Stenotrophomonas maltophilia
  marker
aaaaaaaaagttgctgttgctgttgctgttgcctttgctccggctcgtagcaaaaaaaaaaaagggtgcagggcgcagccctgcaaaacaccccctactcctgcggatcgcgggtgatgtggatgtcggtcggggtcgacagcggaatgttccgctccgccaggatctgcagcaggctgaagtacagatcgctgcgggtggcgtagacctgccgcgggctggccacgtacgcgaagctgttgatggtgatctggccaccggcaatgctgtcgatgtagaccgtcggcgccggctgcttcagcacgttggtgtgcgcggtgtacgcatccagcagcgcctgccgcaggttgccgacatcggtgctgggcggcaccgcgaactggatctggatgcggccctggt

SEQ ID NO: 1452 - DNA, 402 bp, Stenotrophomonas maltophilia
  marker
ccgaccagctggcgcgcatctggtggtcgcactccggcgcttcccaatgctcgcgcagggcctggcgcagcggagcgggcagcaccgctgccgagggacggttcaacaaggcatccaggccggggacggaagcgcggttcacagcatcgagcaggcaagacagaggcccctacactagcgccggcgccgttcagggacaatcaccgcggccaccatcacccggcatgaagacatgccgctacactcgccagcaaacccaggagagacccgccatgccctcgatcgccctgcgtttccgtccacggctgctggcctgtgccgccgtgctgctgtccctgtcggcgcctgcgctggcccagcgcgtggtggagggcgacctgcagcagcagatgtcgccgaccg

SEQ ID NO: 1453 - DNA, 402 bp, Stenotrophomonas maltophilia
  marker
aaaacagcaggagattgcggccgatcgggccggaggtcaggtcaagcggcgctttggccatggagtggtgatcgaatcccgggaggcgcacactagcaccaagccggtttgcgggatgtggcaatgcatcaacgactgcaggtgaagcggagcctggcgctggccttgatcggcgccgtactggccgcatgttcgacaggtgaccggctgggcgatacccaggtgcggccgaccgaccggcccgagtgcctggtcggcagccagcgccaggatctttccgccggcgtacccaccctgatcgggggcagcggctgccgcaccgaccccgacaacccgcgtcccctgaacaagcgaacggagtagtccctgccgatgaccgagctttccccgctgtcgcccagt

SEQ ID NO: 1454 - DNA, 401 bp, Stenotrophomonas maltophilia
  marker
tgcggccacgatcaccgcggtccacgagatgcccacccagatcaccgcgatgcaggccaggtgcatcagcgcgaagggcaccgcgcgcacccagtcgatgcgccccggctgctcgccggtggcgtctgcggcgttgccggtatcgaaccagcgctgcagcgtacgcagcaggcgccagcgtcgacgggggaggggcgctacagaggccatggcggatctcggcgggtgtcgtgtcttcctctacgcagcagaatgcgcaatggatgcgccacggcgcagtaaatttccgcttcacctgggcgtcacggcgcagtcgctcggccaggggctgcgcccacgcctgttgccagtcgcttgccggtcgctcggccgctggcgagcgatgaagcgcaccgtcacct

SEQ ID NO: 1455 - DNA, 397 bp, Stenotrophomonas maltophilia
  marker
caggtgtagcgatcggcctggatttcagccgtgctgcagccgagcagacgcgcggcctcgcccgggtgcggcgtgagaatggcatcgggcaacgcgcgcggatcctgcgccagcaggttcagggcatcggcatcgaccaccagcggtttgtcgctggccagcacccgcgcaaacaaggcgcgtgcccattcgtcctggcccaggccgggcccgatcgccaccaccctggccttgtccagcagcgccggcagcacatcgccatcttccagtgcatgggtcatggcctcgggcagccgggccagcaacgggccgacgtggtcgcggcgggtgcccaggctcaacagccccgcgcccgcgcgcaaggccgcttcggccgccatcgcgatggcgccgccgc

SEQ ID NO: 1456 - DNA, 395 bp, Stenotrophomonas maltophilia
  marker
caccacgcgctggccacgtgcggccagttccagggctgcggtcaggccggtgtagcccgcgccaagcactgcgacatcggcctgcacatccccctgcagcgggggcagcgcgggcggttcgggcaggctggcggcgtaccagctgggcgggaacgcggcgctcactgcaggcctcgcgggcgcagggcgggagggcggagcgggggaggtcgatcagcgttcacccgagtagtttcgccgatgcgtgacggccatggtgtgacggcgacgacttgccgccttcgccgggcgacgggtaacgtgtcggcacgccaaggagttttcccatgcgccgcctgccctgggtgggcctgcccaccgacagcaccgtgctcggccatcaccgtttcgcggtg

SEQ ID NO: 1457 - DNA, 387 bp, Stenotrophomonas maltophilia
  marker
ctgggcttgaattcgcgtggcatccgtccgggcggtgactttgccgttaccggtttcgacgatatttccgaggctgcggtggcggtgccgccgttgaccacgctcaccgccgatccgcgcgagcggggccggcaagctgccgcgctgctgctgcaacgactggacgaaccggacgcgccgccacggcgcacggtcgcgccggtgcagttgcgcatccgcgaaagcagtgccgcacgaccgaactgattccttccatacaccccttccacgcaacaacgaccttccgcgcatcgaggcgcgtaccgcatgccgatctccgcaacgccccgtccatcgggttcttcgggcaacgcacctgccgtcaccaacggcaaggcgctggctgtc

SEQ ID NO: 1458 - DNA, 387 bp, Stenotrophomonas maltophilia
  marker
cgttgcccagcggcggcaccggcgaagacctgcaacgcctgcaggggctgctggacaagcatgcctgccgcgagctgtggatcctgggcgacatcctgcatgggccggcgcatcgcgctgcgtggtaccagcaatggctgggatggcgcgaacgcaatgccgcactggacgtgcatgtcctgcgcggcaatcacgaccgccagctgccgcatgcgcagctgcaggtgcagatccacgatgaagtacgactgccgccgttcctgctccgccatgagccaatgcccgatgcggcgctgcatgtgatcgccgggcatctgcatccgcaggttgccttgccgccactgcgccggcgcttccccgccttctggctgcgtgagcggatgacgg

SEQ ID NO: 1459 - DNA, 386 bp, Stenotrophomonas maltophilia
  marker
cgcaggcgccggtggaggtgcagtacgggccggcccatgcggtcaccctggccgccgatggctggctggcgcagtggcacggcagtggccgcgcgcaggtcaattcggtgcacgggcagggcatcgcccgcctggcgcaggggctgcaggtcgaggccgtggccgacgatgggctggtcgaggcggcacgcagcctgcaccatcgtttcgtgctcggcgtacagtggcacccggagtggcgtgtcatgcaggcgccgttctatcacgctattttccgtgcgttcggccaagcttgccggcagcaccaacagaaccgactggattcccgatgagttcccgaacgcgcccgcgcaagacggctacgccccccgcaccgcaggaaagca

SEQ ID NO: 1460 - DNA, 385 bp, Stenotrophomonas maltophilia
  marker
gagcgcgctctgggcgttcttggcgtcgtgcattgcttcaggtctgtgccgcggtacgggaagaccccattctggcaatccacgacggagccggacaaggcattgacagggggcgaggttcagcggcggggccggagtggacgccggcatcctggcgaagagagggctcggactggccctgggctgggatgccggcgcgggcgcgcgatggtgggcgcgccctgccgcgtgttgcgaaggtcagcggtagtggcgggcggcgcgctgcatgacgatctcgtcacgcatgccttccagggccatcaggcggaccttgccgacaccctgcagttccatgaaccgctccgtgtagaactccggccccagcgcggtgtcggcgcgggat

SEQ ID NO: 1461 - DNA, 371 bp, Stenotrophomonas maltophilia
  marker
acttggcggggggcgtgtggtcatcgcgtcacaagtattagcacaacttatgtagaacattgcaaaaactgttttgccaaatactcgggcccagcggcaccgtggaggcgttcccccaccgctggagtcgccccatgtccgccgtcgcttccgctgttcccacccctgccagcaaggccacccccggcatcgccctggcgacccgcgtggccggccaggacaccgtgctgccggcgccgctgctggccctgctggtgtcgctgcaccgtgcggtggaaccgggccggcaggcacggctgcaggcgcgccgcgagcgccaggcgttcttcgaccagggcggcctgccggacttccgcgaagacaccaccgcg

SEQ ID NO: 1462 - DNA, 369 bp, Stenotrophomonas maltophilia
  marker
gtcgcgatgccaagggcggcaagcagcgcacggagctgaccgaaggccgcatcactccgcgtgactgcccgcgcgcgcagactgccaagggtcgcgccgaccgctgctgggaataaagaggagatgccagccatgaccacaccccgtcgcatccccatggctgccatcggcgccgccctgctgttgctggccagtgcggtaaccgccgccgataccgtgctgcatccgttcctggtcgcgcagccgaagcaggccccgcaggaggtgaacctggcggtggagattccggccggcagcttcaccaagtacgagatcaaggaagacggcctggtgcacgtggatcgcttccagtcgatgccggtcgcctat

SEQ ID NO: 1463 - DNA, 368 bp, Stenotrophomonas maltophilia
  marker
tggggatgaaggcgtcatgcgcgatgcgaagctccaaggaatcatccatgaaaacgttttcaggccggctcggcaagtgccatgcgtgacatcgaacgacgcatacgattgcagtgacccgattgcgtcaccagcgattaacgccacccacggacagtggctgcacggtcggcattccgccggccgctgccggagatccgtacatgagcacgacaccgaccatcctcctcgtccatggattctggggcggggccgcacactgggccaaggtgatcctggaactgcatcgcaacggccacgaccgtgtgcaggcggtggaactgccgctcacctcgctggccgacgacgcaggacgcacccggaaaatg

SEQ ID NO: 1464 - DNA, 365 bp, Stenotrophomonas maltophilia
  marker
ttgggcggtgctggctgatagccatgctgcatatccagatgccgccacgccctgtcggccggtcggttgcctggagtgccggcgcaccggattcctcggccgcatcggcctgtatgagttgctgccattgggttcgcggctgcgcgggcagatccgcgccgacatggatctggccggtttcacccgtgccgcgcgggctgaagggctgcgaaccctgcgccaggccgggcttgaaaaggtggcgcaggggctgactacaatcgaggaagtcctgtcagtcctgccgcccccggatgaacccagccccgttcctgatccttgaaaccggccgaccggtgccgtccctgcgccgctacgggcgcttc

SEQ ID NO: 1465 - DNA, 365 bp, Stenotrophomonas maltophilia
  marker
tcagtcccttctggacctggctggcatggggacggcggggagaactgttcacaacgggcaccggcggggtcaggggagataacccaacatcatacaagctggacgcaacctgactgaaattcaggattgctacagattcgtgcacagattgttaagttcatgttacgttcgataagcactgttttgggctgcggagctggttattccagcgcgcacgatggcgcatgcgcagtgccgatttttgtttttgctctccattggaactacatgaaacacgtcagcaacaccgcacgtcgcaacacgctcgccgtcgccctgatttccgccctgatggccgccgccccggcaatggcccaggacaaggc

SEQ ID NO: 1466 - DNA, 357 bp, Stenotrophomonas maltophilia
  marker
cgtcgctgttcgcgtgccgtttccgaagaagcggtgcgctgcagcaagggagcgaattctagagatcctgcagatttcgtcaaggctttttttgcagggtgatgacagaaccaccacgacatcacgcatgacgtacgctcgaagatcactgcggcgttgaccgcgcgttgcgcggtcaacgccgcaaccgctatcaatgcacggatgcacagtggagacacggcaatgaacatgcaggtgcggcgcgcgtggtggcgcgatctttcgatgccggcaatcgtcgctggcttcattactgtgctggtcggcttcgccagttcggccgtgatcgtgttccaggctgcacaagccgtcggt

SEQ ID NO: 1467 - DNA, 349 bp, Stenotrophomonas maltophilia
  marker
gcagggcgtgcaggtcgatggccaggcgcatgcgccggtgtggctggactggaaccagctgcagcagggcccgcgcctgcagttcgcgctcgacgcgaaggcgccggagcagggctggggtacggcggtgaaggacctgccggtgtcctggtgcgcggcaccgggcagccagctgcgctgagccggactgtgccgttcgcggtgacccagcgaacggcacggcacgacacggccctgatccattaggcttgagcctccagcggagtccgggaagacgatgaacgacaacgaaagcagcagtcccagcaagcgcgccggcaaggcggtgacggtgaccgacatcgcgcgt

SEQ ID NO: 1468 - DNA, 344 bp, Stenotrophomonas maltophilia
  marker
ggcgccacgtcatggcgctcgtaggcatagggggcggtgccggtggtcttgcgtgggccgtcgatgcgcggcgtcgacttgccgacgaccttggccttgtcgaacaggttgtcgccggcgggggcgttgaattcgaggggcatcagcgctctccttccaccaggccggctgcgagggtgcgctcggcgagcgcgatcttgaacgcgttctcctgcgtcggacgggcaccggcgaacacctgccgggtcgcggccttgacgccatcgcgcagcagcggttcggctgcctcgacgcgccacggcttcggcgcgaccccgccgaaggcgaaccgcgccgagccgtct

SEQ ID NO: 1469 - DNA, 343 bp, Stenotrophomonas maltophilia
  marker
cgacttccttcgattccaggccggccagttcctcgcgcttgccgctgatcagcagcatccacgccacgaacatgatgaccagcgccagcaacgagcagaagacgatcttggccttctgcggccagttgccgatgtcgttgaaatccaggttcttcagatcgatcttctggctcatgcgcggtccccctgcagcggggcattgaaggcctgcggcggctgcgccaggcggctgccctcaggcttcggggcaggtgccggggccggcgcggcggccggtgcggccggctggttcggcttggccggtgtggccgcaggcgccgacgcagcagccggaaaaaaaaaa

SEQ ID NO: 1470 - DNA, 337 bp, Stenotrophomonas maltophilia
  marker
gtccacgcgcaccttggcagcatcgatgccgaggatcgccgccatgccctgcttggcccagtcgatcatctggttcgccgtccacagggtgagcgtgtcaccctcccaggcggcgatggtggcgtgcggctccatcatcgaatgactttcgtcggaggtgtggtaggtctcgtcgagcttgaccgccgcgctcgcgtaggcggtgtcgaaatcgccgagcgtctgccggtcgggcttgccaccgcgcccctttgccagcggcgcggacggtgccagggccgggaaatcgaagcggcccttgccgcgctcgtagcgggtgcggatcagcgccgcggcg

SEQ ID NO: 1471 - DNA, 330 bp, Stenotrophomonas maltophilia
  marker
tcggtggcgctggcgcagatgctggacgcgatcgactgccgctacatccgcatcaacgcgcatgcgtcggaagaagacgtgcaggcggtggtcacccacgatcgcgatggtgcggccgcggctgcgggctacctgctctcgctcggccaccgcgacatcgcggtgattgccggtccgggtgaccggcgtagcgcacgcgagcgtacccatggcttccttgaccggttggcccaggtcggcttgaccctgccgggcgagcgcgtgctggaagcgggcgacaccttcgagtccggcgtgcatgccgccgaacgcctgctgatgggcggacaa

SEQ ID NO: 1472 - DNA, 322 bp, Stenotrophomonas maltophilia
  marker
gcgccggctgggcctgaacctggtggtgctgatcctcaacgacggcgcctacggcatgatccgctggaagcaggcggtggatggcttcaccgactacggcatgaccttcagcaacccggatttcgtgaagtacgccgaagcctatggctgcaagggccacgaggtgacggccatcgagcagttcatcccgacgctggaggcggccttcaacgagggcggggtgcacctggtgtcggtgccggtggactattcggagaaccagcgggtgctggtggacgagctgcgccaggcgttccccgggaacaggtagcggcggagcagg

SEQ ID NO: 1473 - DNA, 316 bp, Stenotrophomonas maltophilia
  marker
ctgatccggcacctgcagcagcgctacgactaccgcctgttcggactcggcgcatcgtggctcggcttccagcgcgacagcgcgccgtcgcctgcagaggcgagcgcgttggtcgctgacctgcagcgcgtctacgctgccggaacgcacgacacctggtcacaactggctgcaacgctggccacccgcaccacgcttctattgggatacaccgaagacttcagcgaacagctgccctgagcaccgctctacacgagcgagcgcagcgagcgacccgcttcaaaaaacgcttttgatctgttttccgtggtggccg

SEQ ID NO: 1474 - DNA, 315 bp, Stenotrophomonas maltophilia
  marker
ctcatgctgcgccgcagaatgcattcggctgaacctgcatgctctacttgaatcgatctaaattcacggtctggtgggtcgggcgtcattccagggggagctctctgccagtcgaggcggggctcagcggaacggtgccggacggccccggccgtctgcctccgcgtcatcgactacaggaacccgacatgcgtccagtgccgtccgctcccgccgtcccattgtcctcgcgcccgctggcgcgcctggcctgcctgctcgcgctgtcggcgatgccgatgctgctgcaggccgcgccggcagcgctggagcgtg

SEQ ID NO: 1475 - DNA, 296 bp, Stenotrophomonas maltophilia
  marker
gcgaaccgctgcatccgggcgtgatcgtgcgcttccggccgatcggctacctgaagatgatcgacggcggcgagcacgacgagaagatcatcggcgtgccgaccgacaaggtcgacccgacctacgccaacatccgcgacctggcggatctgccggaggtcgaacgccagcgcatcgaagcgttcttccgggtctacaaggacctgccggccgggcgcaacccggtgcagctcaacggttggggcaacgccgccgaggcgcgtgcgctgatcagcgaagcgatgcagcggttcgag

SEQ ID NO: 1476 - DNA, 296 bp, Stenotrophomonas maltophilia
  marker
acgcggtgtacgaccgtttcgtggcgcagttctgccagaaggtgcaggcgctgaccatcggtgatggccgtgaagcgggcaaccgcatcggcccgatggcgcgccaggatctgctggagcagctcgacgcgcaggtgcgcgcttcggtggacgccggtgcgcagctgctggtcggcgggcaccagctggatcgcccgggcgcgttctatgcgcccaccgtgctggccgacgtggagccgggcatgcaggccttcgacaccgaaacgttcgggccggtggcctcgatcagccgcgcc

SEQ ID NO: 1477 - DNA, 294 bp, Stenotrophomonas maltophilia
  marker
atgcacgcgtccgacgacgcgcgcattgcgctgtacgaggacgaagacccggcgacccccgaagatgcgttggcggcacgcgggcggttgctggcgcatgtggtcgcgcagcttgagcattccacgcatcggctggaatggacagcgctggcgggtacgttgatgtgcaatgacgcagacatcgaggcgctggtcgcggccaatgccgcaccggatctcatcgtcgacgacgtggtctgcgtgcagcaggtgcccgtggaccgcgatgacctgctgatcgccgccctgcccaat

SEQ ID NO: 1478 - DNA, 293 bp, Stenotrophomonas maltophilia
  marker
gttcaagctcccgccgcttgccgttgacggtcaacgccaccgtgctgatgaccggcggcctgggcggcgggggcgccgccagttcggcggcgagcgatgacgcccccggtgcggcggacatcgccacggtcgtgacgccgccggcgatcacctggcgacgcgtcaacttcattccttcatcacaacttggcacagtgacctcctggcgttcggggaaaccccgtggctggatggacgcgctcacactacccaaggggcactatgcccggctggcggggtacagatctgtgaag

SEQ ID NO: 1479 - DNA, 288 bp, Stenotrophomonas maltophilia
  marker
gaggcggcgcagcggcggggtcgaggcgggggcgtcgtccttgtcagtcatcctggtcgtcgtcttgtatgcggatacggtcacgggtggcgtcgcgcaggcggattttcaatgcgtcgacctgatcggccggcaattcgacccgcaggcacacgccgttggcatcgaactgttcatcgcgcttctcggcgccgaaggtgggaagggtggcatgcagggtgcccagatcctcgaagccggccagcagctgcagccgggccatggccaccagcggcagccgcggggcgg

SEQ ID NO: 1480 - DNA, 287 bp, Stenotrophomonas maltophilia
  marker
gtggcatcgatgccggtcagcttgtcgggaacgccgcgcaggacttcggccgcggccagcgcggtcttcaaggtccaggtgccggacaggcggatcaggcccgggtcatgggcatcctgttcgagctggggggcgtggttcggggtcacttgggccattcgggtcgcagcataaccgttctgtatcgggcttcgcgtcgaactcggatgaatttctccggtggggcccagcagtaggtaatactacggcgcatgtccgcagacgctcacacgatccccacgccccag

SEQ ID NO: 1481 - DNA, 286 bp, Stenotrophomonas maltophilia
  marker
ctggtagtatctgcgccccgatgttgcctgggtagggcatcggggcgtatcaaaatgggaaagcaggcacaggatgtgccttgtgttccccggaccaggaagggtcaatgccattcaggcggcgtcaacaggcgactgttgacagctgccttgcgtgccattatgcttctacgtctgggcaggccgggaaactggtctgcctacgtttttgaggtctatggattgaccttgtcggcctgcaggagtgcgggccgtccgtattcaggaatttcatggggcaaagcaa

SEQ ID NO: 1482 - DNA, 282 bp, Stenotrophomonas maltophilia
  marker
ttgatggattcggaggcctgcaccgacgaaacaaccgcggtgccggcgatcagggcgatggcgatggcaatggtcttggcgttcatgacggggcctgtttagtgttggtgatcagtggtgtggtagtaaggtagtacaccaattctgggcttgcaaggaaaattttcgatttccttcgtttgttcagtcttcagtcagctttcgtctgaagcccttcctggcgcaggaagtaccaagcaatccccgtgccaacttttaatcattgatttgcaagggttttat

SEQ ID NO: 1483 - DNA, 278 bp, Stenotrophomonas maltophilia
  marker
cgcatccatgccgatgccttcatcggccacgcagatctgcatccagtccacgccatcgcgctggccggcatggctggcggtcaggctcaggcggccaccgttgggcatcgcctggatcgcgttgagcgccagattcaacatcacctgctgcagctcggtgtagttggcgtcgaccaccaggccttcgtcctgcacctgcagttccaggcgcacggcatcgggcacgttgctgcgcaacagcagtgccaccgcatcgaacaggccatcgatctcgatgc

SEQ ID NO: 1484 - DNA, 276 bp, Stenotrophomonas maltophilia
  marker
ataaagaacgattgccatgtgatgtattcctccaaattgctactgcgtactgcactcgatgagcgatgctgcgagctcatcgagggagagcttaccgcgtcgaacctgactggaacgtcacgaaggctaatgacgatcggttgcatgcagatgactgcgggatcgcagcagaatgcttacggatctttaacttccggctaacgaatccgtagggggattcccgccaacggcgcagcccctcgtggagtggtaaaaaaaaaaaacgtgtaacgcgtt

SEQ ID NO: 1485 - DNA, 271 bp, Stenotrophomonas maltophilia
  marker
gttctcctcgaactgttccgggtcggcgtcgaggtcgtcatgcacccggtccagcagcgacagggcttcgtgcagctggatcgaggcgttctcgatcaggccgtccacctcgcccaggcgcgggtcgtgctcgatcaggcgcgacagctcgtggcgcacctgctgcagcaggtccagcgcggaactgccgtcgtcgccgttgagctggttgctggcggcctggcaggcgctcagcagggcgctggcatgggcctggcggcggtggctggcg

SEQ ID NO: 1486 - DNA, 264 bp, Stenotrophomonas maltophilia
  marker
ctgtgcatcaccgaaccacgacaggccaccatccacgtacagcgtgccctggcccgagttggcctgcgcggtgatcttggccgaaccgtcgggctgggccacgaagctgcccttgccctggtcgaaggtcaggcccagcgcggggaattcgcccttgaagttgctcagctgcgcgtcaccgcccagcgacggctggccgcgcgtaccgcgcaggctgacgtggccttcgatcaggccggtcgggcgcacgatgtccggcgagaa

SEQ ID NO: 1487 - DNA, 259 bp, Stenotrophomonas maltophilia
  marker
tcgcggctggcgcaggcgaaggccacgtgcacgccgtggctggcggtgccgccattgccaagccagaagaacggcttgccgtcgctgccgaagccgatgtggtcgtgcgcgccggtctgttcggcggtcacttccatcaccacgccgatctgcagcggcgccagtgcctgcaggaagaaggtcttgctgcgcgccaggtcggcgctggtcaaaccaagatgatcgagcatgttcaggcttccgtgacccagtggggcgc

SEQ ID NO: 1488 - DNA, 257 bp, Stenotrophomonas maltophilia
  marker
ccgggtgggccgaccgtgatccatatcggctactcgcaggcggcggtggagcaggtgtacttcccgcaggtggaagtgatcggtgacatcggtcgttcgctgacccagctggccgaccgtatcgaaggcgcggtgccgaacgccgacgcgctgctgccgctgcgcgcgaccattctcgaacacctggctgaccgggccgaggaggctggattcaccccgcagcggctggtgcacgacgtgcgccaggtgatgccgcc

SEQ ID NO: 1489 - DNA, 257 bp, Stenotrophomonas maltophilia
  marker
gcggaatgaactcgatgcccgcctgcttcaggccaccatacagggccttgttgtagccggccgacagcgcggtggcggcggccgcgttggggccacggaactgcggggtgatgcccacgtccggcaggttcggcaccagcacgtactgggcaccggcctgcttcagggcgcccaccagcgcgatctggtcggtgaccgcggcgccgatgatgccctgcacctgggccggcgatgcaccaccggccgctgcgcgcgcg

SEQ ID NO: 1490 - DNA, 247 bp, Stenotrophomonas maltophilia
  marker
ctgcggtccggccatggcctggctggacagcaggctggcggcgatcagcagggcttggatcgggcgacgcatggcaggctccagaagtcagtccataggaagatatagcaagtgactgaaattagtagtgttgtcatgaatcgccaatgagcgttccctgctcacattgatgcgcgctatgcccgcaatccgaaccctgcatcccggcgcgacaccggatcggcgacaatacacaccatgctcgacg

SEQ ID NO: 1491 - DNA, 244 bp, Stenotrophomonas maltophilia
  marker
agcatcgccggcagggccggccacagccaggtgggggagccggtggtttcatcgcggccgagcgcgcgcaccagcagggcactggcagccaggtagagcaggacggcgatgagaacgattgtcatcgttgcagtttcgcatacccctgtgatgctggcgacggccccgtggtcgcagtccggggagacagccggacccgttatactgtctgccttattgtcccccgctttcagacaggttgcgc

SEQ ID NO: 1492 - DNA, 241 bp, Stenotrophomonas maltophilia
  marker
gcccatgcccaggtagcccttgatgctggccggggtcatgtcgagcttgagcgagaactggtcatagcgcaccagctcgccgcgggtggtatcccccacggtgttgcggttctcgcccaggcgcacgccgccttccttcgagcgcacttccacatggccttcccaggcattgccgcgcgggcggatctgcgcgtccaggctgacatcgccacgcaggtagatgcggcggccggactgcggc

SEQ ID NO: 1493 - DNA, 241 bp, Stenotrophomonas maltophilia
  marker
ctgcagcgcatcggcgatggcttcggtcaggtgcagctgtgccggacgcgggacgaaggcatccaggtgcgaggcgagcgcgccgccgtcgctgagggcttcgcggctggcatggacaaggtcggacatcagagggaaaggatacccggccgggcgctgcccggcacccgtttcaaaaaaaagccagagcaccagcaacagcaacagcggtgttcatggctctgggttgaaaaatactggg

SEQ ID NO: 1494 - DNA, 240 bp, Stenotrophomonas maltophilia
  marker
atgcgagtggttcttaaagcggactgaaattgtacgcttttattcgccgccatccaacccgggcattcagccggcgctaggggccgggccgggaggacacaccggggccgttgccggggcgccaatgctgcgccaacggggtgattttcgcaatcacccggaatgggcgagaatccccgttccatccgctgcaaacagcccgtgccgatgccgaagaagatccaagcccgcaagtccgcc

SEQ ID NO: 1495 - DNA, 237 bp, Stenotrophomonas maltophilia
  marker
ggcgtcacggtcccaccactgcatggggtagtcgtagtggcgttgcaggtgctcgcagttggcacgcaggtcacgctcatggcgttcgcggatggcgacgctggcgtggccttccacccaatggcagtcgatgccgtggcgatcgatgcgcgtgcgcatcgcctgcaccgcgtcgcgcgaccagtcgaacaggtggcgcgcatcatcacgaccgagctgacgctccagttcgtccac

SEQ ID NO: 1496 - DNA, 229 bp, Stenotrophomonas maltophilia
  marker
ccaaccctattcctcgaccgggaagtcctcgatcggcttcagcacatcgtagtgctcgcgatgcagcttgcccttcagcttcggcagctccggcaacggtgcatccacccgcgtgtccggcaaccggtccagcaggttgcgcaccagcgtcagtcgccccagccgctggtcgttgaaatccaccagcgtccacggcgccgcctcgcgatgggtcgcgcgcagcatcgcc

SEQ ID NO: 1497 - DNA, 224 bp, Stenotrophomonas maltophilia
  marker
gtctctcccgtgtaggcatgcacggcgacctcgcagaaatgcgctgcataggtgccgacgtcgtagccttgcttgaagtcgccgaaggcaatgccgtcctccgccgacagtgtgcccgcctccgccaggttgatggtccgcccacccgcctggatgcggccattggcgaagtctgcggtgtcgccgtcgaagccggagtttctcgcccaccttgcggcgcaggc

SEQ ID NO: 1498 - DNA, 217 bp, Stenotrophomonas maltophilia
  marker
aggtggcggcggcgcgcggcgtcgtcagggtaacggtcgattatcgcatgcccggcgccccaccgcgaaagcggactgctcggggcccgcccggaaaggccgaagccccgccagggcggggcttcaggggagacacaggggccgccgaagcggccccaggcaggccttactggccggccttgaccgccacgaaggcgctgttgccgttgccggtgcg

SEQ ID NO: 1499 - DNA, 215 bp, Stenotrophomonas maltophilia
  marker
atgatgcacggatgccgatgaggcgtcatcgcacaaaacggtgcagaatccggtagcaagcgcgggacacgttgtggataaaaatggcgtttgaaatcgcgcgagatttatccacagctttccccaccccctgggggtcggtaatacagagggtttcgaggcctgaaatccttttatttacaaagacttagcgttgttttccagcgattctgtct

SEQ ID NO: 1500 - DNA, 215 bp, Stenotrophomonas maltophilia
  marker
accggcaccctgcagggcgagttccgtggcttcggcaagggccgcgtctacgtgctggacaacggccaggaatgggagcagaccgacgccacgcagcgtggtccggcgtgcgcaagcaagcgcccaaggtcagcatgcaagcccggcgtgatgggcgtgtggtacatgaaggtggaaggcgtgaacagccagccgaaggtgcgccgctccaagta

SEQ ID NO: 1501 - DNA, 212 bp, Stenotrophomonas maltophilia
  marker
cggccggtgcggcggccggtgccacggtggtgcccaccggcttttccgccggtgcggcagccagcgccggagcgcaggccagcatcagcgcgactcccagcgcgctgacacggttcaaggtagagcgccggatgggacgcagccccttggcttggtgaaaggtcatcgtgctatccccagtaaacgatcattgatcttcaagcgagagcgtt

SEQ ID NO: 1502 - DNA, 212 bp, Stenotrophomonas maltophilia
  marker
atgaaaaaccccaccccctaccaaggtagggcggcccgcgcggcagcgccggactatcctcgaacccatgactttgtctgggagggctgcgtcatgaactacgaggaaacctaccgtcgctcgatcgacgagccggaggccttctggggcgaggaagccaagcgcatccattggcacaaaccgccgcagcaggtgctcgactacagcaaccc

SEQ ID NO: 1503 - DNA, 210 bp, Stenotrophomonas maltophilia
  marker
cttcagcagcgactcgatgccggtgatgtaggtctcgacgttgtccagcgactgctgcacttcgatcttcgtcggctgcaacaggctgctgtccttcagccgttcctcgtagcgctggcgcgccagcgtggtgaacgcggtgccgcccggctgcaggccggcataggccttgaggcggtcgatcgccttggcccggcgctcggccggcac

SEQ ID NO: 1504 - DNA, 209 bp, Stenotrophomonas maltophilia
  marker
gagcgttccctgtagagccaagccgatgcttggctcttttcgttcgggattgcggctaggctgtggcgatgaagatcacttccattccgctggacaaggccgtgtcggacggccccatcgatgccttcagccatgtcctgctgggcgattcacccacgctggatgaggtgctggaatacctggcctcgctgcacgcggctgatccccgc

SEQ ID NO: 1505 - DNA, 202 bp, Stenotrophomonas maltophilia
  marker
gccatcagccaccgtgccattgccctgcagcagctcaagcagcagctggcgacgctgtactgacgccaaacccgatcgaaccagggaagccggccagcggccggcactaccgaagaagcccatgccgcacgcccacgaccactgcaaccacctgcccggcgaagcctgctccgctgaccacgacagcccgccgcggctggtg

SEQ ID NO: 1506 - DNA, 199 bp, Stenotrophomonas maltophilia
  marker
catcgtccgggcctgaaggccgcggtgatcaatctggacgacgccttcggtcgccagctgttcgccggcctgccggcgggcgtgcagccgatcggcctgagctcgcgcggtgccaccgacgccagcgtgcgcgccgaggcgctgcagctggacggccgtggcattgccttcgaactggtcatcgacggccagcgcgcgg

SEQ ID NO: 1507 - DNA, 196 bp, Stenotrophomonas maltophilia
  marker
gaaggctcgctggacggtggcgggggatgtggggctcgcggccttccatcgcaagggcgcactatagcgtggcaccccgttgcgtcatgcgacggtgacgggtttcagcatcctaccgacgccctcttgaccctcgtacactcagagccatgagccgccattcacgacaccccgaactgcaccgctccgagcgcgt

SEQ ID NO: 1508 - DNA, 194 bp, Stenotrophomonas maltophilia
  marker
caccagcaccggctcggaatcgagcaggccggcgcgctgggcgcgacgcttggcgaggtacagcttgtccgcaagcaggatcaggcccgaggccagggtcagcacgaccaggaggatctcaaacagtttcattcagggtcctttgcaacgtcaccggacgaccggccccgcagggccggtgcgggaattacttg

SEQ ID NO: 1509 - DNA, 194 bp, Stenotrophomonas maltophilia
  marker
cgcggcggttttgcccgcggctgataggcctgttatactttcgtcttcctgacgtgatggtccctccgcttcgcggactccggccacacaaacgaagggcggcccccgcagcggttccgggtgggggtgtgatgaggtggtcccgcgctggagtagcgcgggcggccccgggggaaaccccaggtccaacccca

SEQ ID NO: 1510 - DNA, 193 bp, Stenotrophomonas maltophilia
  marker
cctgcgcagcagccgttcggcggccaagtacgcccaggtctggctgcccgacggctcaccgctgatggtccatacccgccagctggcgcaggccatgcaggccctgctgccgaccctgacagtgcgccatgcgatgcgctacggcgaaccggccctggccagcgagctcgaccgcctggccgccgaaggcgcg

SEQ ID NO: 1511 - DNA, 193 bp, Stenotrophomonas maltophilia
  marker
ggtgccgccatcgaagcgggcctgccagccgatgcgaccaacggtcgaatcgacgttctggcggtcgtagcccagcgcggtggccagggtgccggccgcagcgctttcggtgtaaccgtcgatcttcaccttctgccagatcaccgaggcgatcgggccgtggcggaagccgccttcggtgccgaactcgtaa

SEQ ID NO: 1512 - DNA, 191 bp, Stenotrophomonas maltophilia
  marker
cagcttcatcctgccgctgctgtgctacggctacatcattttctacggactggtcggcgcgcgtacgccggcttccgcaacgcagggaggctgagtccggaatgggtgccatcgtttgcttcggcgaaattttgatcgatctactagcgcagccgccggcctcggccgataccccgcgtgcgttcctgcag

SEQ ID NO: 1513 - DNA, 191 bp, Stenotrophomonas maltophilia
  marker
atcccgggaaaagttcagtcgccgatcacccggcgccgcaccagcttttaaccaccgttccgttagcgttccggtccacggccatggatccggggtcgccactcccctgctattgggatttgacgcgggggaaacaacctctggatcatagccgcttctccatacacaaccggatggaacgtccatgctct

SEQ ID NO: 1514 - DNA, 189 bp, Stenotrophomonas maltophilia
  marker
caatgaacgcgacagcgtcttgggcgtggtgttcatggcggcagctcaacgggcaacggacaaaggcagtcgagcatggctcgactctacaccgcccccatgtctacggcgtgcggtggcgcagggcctgcaggcgtgcgccgaaccaggcggctgcggtctgttcaggctgccccggacactggatgc

SEQ ID NO: 1515 - DNA, 184 bp, Stenotrophomonas maltophilia
  marker
cctttcgggcactgtcaatcccttcatgcggataaagcgatgaatatttttggagcagctatgcgaaggccgtcgcggtcgtcccgttcaggatcgggtacagtccgggcggtccgtattcgctggaaacgctgatgccgcgcctgcccctgacctgcctgctgctgcctctgctggcgagcgc

SEQ ID NO: 1516 - DNA, 184 bp, Stenotrophomonas maltophilia
  marker
cgcagccgttgcgggtggttggggagattacggagtgggagctctacgacgcggagttcgttcggcagttgaaggcgtttgttgcttcggggagtggggagatcatcaactgatggcctgctggcgctgggcgttgcgcacttcttcatcggcttcatagatgtccagcccgagctcaatgccg

SEQ ID NO: 1517 - DNA, 184 bp, Stenotrophomonas maltophilia
  marker
gtcggggtcgcggacatgcgtacgagtcttggccggcaagggggtgcgctagtataacggccgacctgcggggcattccgtacccgggaggagcaggcagatggaacatcggctgccggtgggcacgcccggcgaggcaggcggcgtcccgctgccgtggggccgcctgcatttcgaacaggtc

SEQ ID NO: 1518 - DNA, 181 bp, Stenotrophomonas maltophilia
  marker
gcgcgtggccgaggctgccgtgatcggggtcaaggatgaactgaaggggcaggtgccgctggtgttcgtcaccctcaagcagggcctggatggcgaggatccggcgccggtggtggccgagatgatggccacggtgaccacctcgctcggcgcggttgcacgcccggcgcacgtgcacgtg

SEQ ID NO: 1519 - DNA, 180 bp, Stenotrophomonas maltophilia
  marker
acgctcgccttccacccacttctcaaggttcggtgcatcgccgggcgtgctggtcacgccacggccgcaaccggccagcagcagcacagccagcaccatcgcaccacgtgcggtctgcgaacggatcacttcttgccctccttgccggcttcagccttctgctgttcctgcacctcggtc

SEQ ID NO: 1520 - DNA, 177 bp, Stenotrophomonas maltophilia
  marker
cggccctgcgatcaggagccccttcgggggctcctgaaccgggcaggggaggcgttcagctttcctttctgcgaaaaaacccgaagagcccggcgcaagtcgggctcttttggcgtatactcccgcgtcttgccctgtgcagacggggttgtaggagtgggcttccggcccactgca

SEQ ID NO: 1521 - DNA, 173 bp, Stenotrophomonas maltophilia
  marker
gaagggtgaaattgatattcatggttagctcgatcgctggtttcggggtggacgcgccgccgtagcggcacatccggccttcatccgaaaccgggtgcatcagcacccggtcgtctcaaaccgctgtatcagccggccagagccttggtgacggcgccagcaaaggcagccga

SEQ ID NO: 1522 - DNA, 173 bp, Stenotrophomonas maltophilia
  marker
agctgccgttgcggcaacggcgtgcacggcttgccgacatcatcggtgccctgggcgatacacggatccagctctcgcccgacgttgccgccgaagactggccgcaggcggcagcgatgcgggacatggcacgcgagcgtggcgtggaagggctgatgctgaaacgtcgtgcc

SEQ ID NO: 1523 - DNA, 172 bp, Stenotrophomonas maltophilia
  marker
ttcggcgtactgcaggtattccttgtcacccagcacgtcgaacatcgccaccgagcggtcctggtccagcggatcctcggagtgctcgaacggcaggtagatgaaggcgcgcagcttgggcaccagctgcaggtccaggccttcctcgatggcgcgcatggcgtaatgccgg

SEQ ID NO: 1524 - DNA, 166 bp, Stenotrophomonas maltophilia
  marker
aggccagcgctacaactacccgggcaacgaatcgaccccgttcaacgacggcttctacagcgtctacggccgccagatctcggcccaggtcaagtacaacttctgatcccgtcgttttccggacttcgtgtctggaccaggccccgcttcggcggggccttttttt

SEQ ID NO: 1525 - DNA, 164 bp, Stenotrophomonas maltophilia
  marker
acctgctccatctggtgcacggtggcggtcaggcggaaacggcggggttccttgaccaggcgggccgccttgaccaggttctcgccgaggaaactgcacagcgccttgatgttgtggccagtggcatggacgctgacacccagccgttccagcgcggccagcac

SEQ ID NO: 1526 - DNA, 163 bp, Stenotrophomonas maltophilia
  marker
cgctggcccagcgtgggcaggctgaagtagtcgtaggtcttgccgccgacgttcagctggctgcgggtggagaacgaatcgctcatgcggggtaactccttcttgcggatggcttgctctggcccgtgcgtgggcgggcctgcttgcggtcgccgaaaaaaaa

SEQ ID NO: 1527 - DNA, 158 bp, Stenotrophomonas maltophilia
  marker
cacgtgccgaccgcccaggggctccggcagcgtgacgtgggtgatcagctcaccgcgctgcagcacgttgtcctgctgcggcctgtcgccgggggaacgatggaaatcggcaatcgggatgctgcgcgtactgccgtcacccttgacggtctggatcg

SEQ ID NO: 1528 - DNA, 157 bp, Stenotrophomonas maltophilia
  marker
acggctggacccggcgcaggtgcgcgcgtggaccggcgatgtactgatcgagcggttggattgaaacccctgcagagggcgctgcggctggcctcaggccaccgatggccccttctgcaaggacgaacccgaagaattccaggagttcccatgcaag

SEQ ID NO: 1529 - DNA, 153 bp, Stenotrophomonas maltophilia
  marker
catccgcgaattcgtcaacgcgcagacggtgtggttcgacaagcgttgacgcgcagctctcatccttcctgcaacgatccaccatcagtccagcgaaaaggacggcattccaatgtccaagggttcagatctgcttgtcgccgcacttgagaa

SEQ ID NO: 1530 - DNA, 149 bp, Stenotrophomonas maltophilia
  marker
ttgcggggaacggcgaggcgacgttggcggcgtgcagggtcatcggtcagtgcctcagcgggtattccattcgtgcacggtcagctcggaggcctgcatcgtcaccagcggatcggtggcgacgatggcctgcgcctgcgccaggctct

SEQ ID NO: 1531 - DNA, 148 bp, Stenotrophomonas maltophilia
  marker
ctgcacctcgctgctgtacgaagggctgccgaccaacccggacccgggcatctggtgggcgctgtgcgagcagtacaacgtgcgcacgatgttctcgtcgcccaccgccatccgcgtgctgaagaagcacgacgcggacttcatccat

SEQ ID NO: 1532 - DNA, 147 bp, Stenotrophomonas maltophilia
  marker
gtcgaagaccgcgtcgatgcctggcagcgccgcaatccgggcgtgaccgtcagcctggtgcgcgactattcggtcgatccgggctgggtcgaggccgttgccggctcgatccggcgctactgggaacagcacggccgcggccagaca

SEQ ID NO: 1533 - DNA, 146 bp, Stenotrophomonas maltophilia
  marker
gaggaagaaaccgaccacgatcaggaccgtcaggaacgaggtcagggtcatgccgcgctgcgtgttcatcgtcttcattgcgttctccccagatacgcgttggatgtgaaggtactcagttgatgcccgatcagttgatgctcgag

SEQ ID NO: 1534 - DNA, 146 bp, Stenotrophomonas maltophilia
  marker
ctgaacccgcgcacaagctgagtatgcaaagcttgctcggggaagacaatcacccccgcgccaattcgcccaccagttccggaagtccgttgctggccgcctgcacgttggccagcacttcggccatcgtaatctcctcgccatca

SEQ ID NO: 1535 - DNA, 143 bp, Stenotrophomonas maltophilia
  marker
aagcacttccgggaacgacttgatgctgttgatgaagtgattggtggtgtcctcgtcctgcccgcgcagccacacccgcacgaacaccgtgaagccacggcccaccttggcctcgttcaacaaggccacgtagcggtcgatgt

SEQ ID NO: 1536 - DNA, 141 bp, Stenotrophomonas maltophilia
  marker
gggtgcgccgcctgtgcattgtgaacctgtaccggttgccggtggttaagcccgcgtaggcccggcaggggccgtcctgcagcgggattggggcccagcctcgaggcccagtgttccaccagcgtgacaacgggccgggta

SEQ ID NO: 1537 - DNA, 141 bp, Stenotrophomonas maltophilia
  marker
cgcagctcccgcagggataagaaaagccgcgatcccggcaaggatgcggcaacaggggtgttcagcgcgtcattatcgcaaggggatgtttcaacgcatagccgccgggtggcgggagtgccggacgctggccggcaacgt

SEQ ID NO: 1538 - DNA, 140 bp, Stenotrophomonas maltophilia
  marker
accttgcggccttcgatctcgatgtcggcgaagcccttggccagctgctcgttgccgaccgcggcgccgccgccttcgttgacgaacgaggagacatcgtcgctgcgcttgtcacggttggcggtcatgccgaccagggc

SEQ ID NO: 1539 - DNA, 132 bp, Stenotrophomonas maltophilia
  marker
ttcggcgagcacggcattggtgaaggccagttcgtccatcgccggttccggtgccaggtagtaggacacgttctccaccgcgatgcggcggccgagcaggtcctgcacgcggcgtgatgcgctgcgcggtat

SEQ ID NO: 1540 - DNA, 131 bp, Stenotrophomonas maltophilia
  marker
cggtatcagcttcgtgttctgatcccccgccccttccacggcactctctctcctggcgcggcctccggaacatcggggccgcgttttttgtttgcatcgtcgagcaaaagagaagcaggttggtcgagcgc

SEQ ID NO: 1541 - DNA, 130 bp, Stenotrophomonas maltophilia
  marker
cgcgacgcgtactggaaaccccatgtgcatgcagcacctgcaacagcgccggcaccgtggtcggttcgatggcgaaatggaagtcgatttccgcgcgacgctcgccttcacccaggctgtgcagcgcacc

SEQ ID NO: 1542 - DNA, 129 bp, Stenotrophomonas maltophilia
  marker
tgcggtcggtgccgatgcgatcgtcgagcggctgaaggcactgcagcagcgccacggcgaccgtttcgccccgcgcccgggctgggacaaccccaccctgcgcgaaccagtggtttgagtttatcggcc

SEQ ID NO: 1543 - DNA, 124 bp, Stenotrophomonas maltophilia
  marker
gagggtccagccattgtcgcgacggtcgaacttcacgttggccggcttcacattgtccgagtagttgatgtacaggcgcttgaagaacaggtcctggatccgcgacggctccatgctgcccacg

SEQ ID NO: 1544 - DNA, 118 bp, Stenotrophomonas maltophilia
  marker
gaagtccttgctcagcaccgcgcccagcatcaggccacgaccacgcacgtcgctgaacacgccgaactcgtcgttgatgcgggcgaagccatcgcgcagcgccttcgactggcggctg

SEQ ID NO: 1545 - DNA, 111 bp, Stenotrophomonas maltophilia
  marker
gaacaacggcgcattgttccagttcgatgtgccgaccggcttggtttccggtgcggtgatgaccgccagtacgccgggcgcggcacgtgcgcgggaggcatccatcgaaat

SEQ ID NO: 1546 - DNA, 106 bp, Stenotrophomonas maltophilia
  marker
ccgcctcagccgcgagcaggtcagcgactacgcccggcgcaagggcgtggaccgcgcccaggccgagcgctggctggcctccaacctcgactacgaccccgaatga

SEQ ID NO: 1547 - DNA, 105 bp, Stenotrophomonas maltophilia
  marker
cgaagcaggtcgccaggtgggcgaaggtgcccagctggtggccgatgccggccagcgcatgcagggaattgtcggcggcgtggagaatgtcagccacctgatgca

SEQ ID NO: 1548 - DNA, 104 bp, Stenotrophomonas maltophilia
  marker
tgctggcggccgggtcggctacgttgcagcgtacccggaagtgcttggcatggtcgtcaccggattctgacaccagttcatactgcggcaacgccttctgtcgg

SEQ ID NO: 1549 - DNA, 103 bp, Stenotrophomonas maltophilia
  marker
tcaccgtcatcagggtcgacatcatgctcatgcgtgcaggccctcttcgctgccgatcagtttcacgaacgcatcctccaggttggattcgccggcctgcgca

SEQ ID NO: 1550 - DNA, 100 bp, Stenotrophomonas maltophilia
  marker
gtgtacgaaggccagttcctcaacgagaaggccgatggcgtggcaccggtggtgggtgcgcgcatgaccttcactccgtccgagcgctggatgatcacgc

SEQ ID NO: 1551 - DNA, 443 bp, Mycobacterium tuberculosis
  marker
tggtcgccggacacgaggaggcagaccgaggctcgatggattggatgccgctcggcgactacgagactttccggcattggtcggggaagccccgcgcatgggggccgcaagagtcggggtggcgcgcgtggttcggcgggaagatagtcgatgggctctgcgaggtactcgacgagcacctcgcggtgcggcgtcgtggtgttccagccgcgatcggctgcgtgccctggctgagtagcgaggcggtcgccgagacgctgctcgcattgagcgtcttttgcgtggtgatcgacaagggaacctcgttcccgtcgcgactgcgtaaccctgacaaagggtttcccaacgtcgccctattgcggcttcgcgacatggcgccctccgagcatggctcacgctgctcctcggcccgtggtcgtctatgcctgagcatgagctaggtc

SEQ ID NO: 1552 - DNA, 416 bp, Mycobacterium tuberculosis
  marker
atgttgcggtcgtcgacgcgaatgagaatgtcggtcttgcctgcgccgttgaagagttcgcccccggcatcgccttcaaactgtgcgttgaggccgacgagcagcatgtctcggatttcttccccgtcgagcttggcggcgacagatggggtgcgctccaacgcgttccgctggttacggagcacccgaagtgcggactggtagtcctcatcctgcattgcaggctccggcttgaatgctgccctcgcgcccgctgggcggtgtggccgcggacgcacgcttttccgactgatcggagctgcgtatgtgtcggcgtccttcctgcggcgtacagggaagccgatctcggcctggaggtttcgggtcgctaagagctgctcacggcgcctcgccaccatgcccggtagctcgttgcg

SEQ ID NO: 1553 - DNA, 340 bp, Mycobacterium tuberculosis
  marker
tccgctgaccgcctgtttgccgcttgcaccagaccacaccaacccggacacgccgcggcggatgcgttacgtcaccggtgaccacgcggtgcaggtgttccaactgaccagcaccgttatcgatctcaccaccaagcgcaaacacaccacggtcgtgtacgcggccacctccatgtcgggaacgccacccctgcacaggtagcctgctggttgctgggtcattgcgccatgccttcgagaacaaattgcatcggatgcgcgacgtcacctacgcaaaacccctcccaagtccgcgctggtcagggccccaaggttagggcacccgcgcaacagcgccgcc

SEQ ID NO: 1554 - DNA, 296 bp, Mycobacterium tuberculosis
  marker
gtatacgcgtggtaggggtcgcgtaacgacgtcacgtgcagggcacgttgttcccatgatgccgggcgcccatgttccatgatcgccaggtacttgccctgatcgccgcctatacgatctagctgggggccgtagtcactaagaaatttttcgagattagtgtaggcgatccttgtccctggaaccgcaccattgttaggcggaaaattagagtactgctggccccatgggcctacactattaaatcgctcttgataccgttcttgggtatagggctgtccctgaggatcgcggcc

SEQ ID NO: 1555 - DNA, 276 bp, Mycobacterium tuberculosis
  marker
aagcggctcgagttcgggatttttgtcaatgcggctcaacacggtgtccgcgccgccgacgctctcgcatatctcgcgcgtggttgtctcggcgcggtgccgggtgcgttcctcgatggcgtcgaacacggtttgtagcgggccgccgaccatcgggatggcggataggccggcgctgatcacgacagcgaagacaggtctgggctcagtcatagctcgaacagtagaggccgtcgcggcaaggacggccgacggcgtgttttcggcgttgcgggg

SEQ ID NO: 1556 - DNA, 262 bp, Mycobacterium tuberculosis
  marker
ccgcggacggtgtggtggggatcggccaattggaccgtgcgggccgggtcacacttggaagttggctttgcatgcgacgacccaaccctcgtcgaagaagctacagcgtttgtcgctgacgtgatcgcgttctccgaaccgatcgacacgacctgtgccggtcccgaaccgaacctcgtgcaggtggagttcgacgacgccgcgatggctgaggcgatggaggagatggccgagcccgatgatgacggggaggattggtagc

SEQ ID NO: 1557 - DNA, 209 bp, Mycobacterium tuberculosis
  marker
aagggcaccacgagaacgagcctcgtcacgcgtcgggtgcgctgttcgccccaatcccggtactgctggtcgacctcggtggctggcagcatgaaagcgtcgtcgacgcgcagatcggggcattcgaccgaacccaattcgacgagctgttcgacgacgtcatcaacgggcgtgttcagcaggtcgtcggcgtcccagctctgaagacg

SEQ ID NO: 1558 - DNA, 208 bp, Mycobacterium tuberculosis
  marker
ccaagacgtcgtccaagcactgcgcggcggcggaatcgacatcgtcgccatacacaaccacgggttcgacgaacaaccacgcctgttctacatgcacttctgggccgagaacgacgccgtcgcactcgcccgcacgctacgcgccgcggtggacgccaccgcggcccggtgaccccgcgccccggcgcataccgacccgccgcgaacc

SEQ ID NO: 1559 - DNA, 197 bp, Mycobacterium tuberculosis
  marker
cgatctgccggcgcgaccaaccgaggtacttctcaatattcgcgatctgcttatgaaacgccgcgttgatcgccgcggcgtcattcgacagattgtcgatcgccaggtggatttcgtgaccttgtagccgcagtacctgcggcggcatggtcgtgaactggtccgggcgaaggttaaagatgtccttatgcccctcg

SEQ ID NO: 1560 - DNA, 187 bp, Mycobacterium tuberculosis
  marker
ataggccagcaggcggtggccgaagtcgctgacgtcgtggataaggatgtggccgctttcttctgccggagtcccggtgccgttgccgtgccaaacggttgttgtcgcgatcgcgacgccggtttgaatgagggccgctagcaccggcacgggctcgaccttactcgccgccctcatcacctcgcgt

SEQ ID NO: 1561 - DNA, 162 bp, Mycobacterium tuberculosis
  marker
tcgtcgacgtcggcatcggcggcgtcttcgtcggagtcttcgtcgtcggaatcggagtcttcaacgtcgagatcctcgtcgaggtcctcgtcgtcgaggtcctcgaggtcctcgtcggcgtcgagctcgtcctcgtcttcgtcggtgtcctcggtgtcctcg

SEQ ID NO: 1562 - DNA, 153 bp, Mycobacterium tuberculosis
  marker
gccattcaatctgcggaatcgaaaaattcggttccagcctgctcgtttcctttccgacagcgatctgacgttgcgtaacgtcatttgtacggactcttttagcggcattgatttcagatgccaacgccgtctgtgctgtagcgccgattggcc

SEQ ID NO: 1563 - DNA, 153 bp, Mycobacterium africanum
  marker
atccttcgacgagcttgtcgggggtcatgattactgttctcgatatgaacggattcaaggatgcgaggcccgatcgtcttccgctttcggcatcggtttgggatatcgcccagcgatacaacaagggcggacctaccgtcactgaggcgctat

SEQ ID NO: 1564 - DNA, 152 bp, Mycobacterium tuberculosis
  marker
attctcggccgaaccggcaagctgaacgatggcagcgtctacaaaatcgggtttgcgcgctcggatctgagcgtgcagaccaagggggtgaccgtcgcccccgcgctgtcactcgggtcgtgggtcgcgttcgcccgcacccccgacgggca

SEQ ID NO: 1565 - DNA, 137 bp, Mycobacterium tuberculosis
  marker
ggcagtacagtgcgccgccgtgcgcgttctcccatggaacgttcacgggctcccgtggatgacaggcgtttcatgaacgccagcgccgccgcaacccgaccgaaagcggttgaccccaaggagagctggaagtcgag

SEQ ID NO: 1566 - DNA, 132 bp, Mycobacterium tuberculosis
  marker
gggtcgggtggtgcgctggcccaattgcgccgagctggcaacgccgcgccgttccagggtcacggtcggatcgattccgccgcactcggtttgacgagacgacgaccggctagcagttagccgggttggccg

SEQ ID NO: 1567 - DNA, 126 bp, Mycobacterium tuberculosis
  marker
gtcggcgtgcatggtgaactcgtactggtctgcaccggcccgatgtgcggggcagcgcttatgattcgggtgctctttgatcttggcgatggcgttatcgatgaccgcggtcacgtctttgttgcg

SEQ ID NO: 1568 - DNA, 124 bp, Mycobacterium tuberculosis
  marker
ccagtcctgcaaatccgttgacaggtccacacctattgtcactgtcgcaacaccccgcgccttattaactcttccactttgcgcatctcgttctgatgatcgaatatccgcacttggatggatc

SEQ ID NO: 1569 - DNA, 114 bp, Mycobacterium tuberculosis
  marker
cttacccgaagatagtgctcatccccgacgcggctacggaggcgtttcggcggcgtgccgcgatgcaatgcagccagcggagccaccgggccgtagccgacgtcgcgtcgtggg

SEQ ID NO: 1570 - DNA, 113 bp, Mycobacterium tuberculosis
  marker
tccgggttctggacaccgaaccggccgacggggacggcggttagcatcggcgcatgcccgcaccgggccaccgatagcctccgggtgcgcaccgatgagatctagcgaggaga

SEQ ID NO: 1571 - DNA, 110 bp, Mycobacterium tuberculosis
  marker
ccgtcgtgggtcggctcggatccgtgtgcgctcagtgatcggccgtgaggccccgattcggttgagtgaacgcctccgggcgtggaatgcggcgccgccgcgggtgctgc

SEQ ID NO: 1572 - DNA, 109 bp, Mycobacterium tuberculosis
  marker
aacaccggcgacgccaacaccggcggcggcaacaccggcaacggcaacatcggtggcggcaacaccggcaacaacaacttcggcttcggcaacaccggcaacaacaaca

SEQ ID NO: 1573 - DNA, 99 bp, Mycobacterium tuberculosis
  marker
gggctgaaaaggtgcccggatcgccggcagttcacgctcgcttcggacggagcctccgaaatacccgtaaagatatttttcgatcacggacattgatgc

SEQ ID NO: 1574 - DNA, 97 bp, Mycobacterium tuberculosis
  marker
gccatactgcgggtcaaccgcttcgtcggataaccgatgccaaccctctccagctggttcgttcgaatgcattgcaagctgctgctcgcgatgcggc

SEQ ID NO: 1575 - DNA, 96 bp, Mycobacterium tuberculosis
  marker
tatcccttccagcgcttctaggagtttcgcgtttcggacgaatgtcttaaccgcgtcttcacgcccggactggtagacgaaccggacccgcaggta

SEQ ID NO: 1576 - DNA, 92 bp, Mycobacterium tuberculosis
  marker
tgcagccggatcaccgtcggtttgcggctttggcggtgcggcgggctccggttgcggctttgcttcgggttgcggctgggctgctggctcgg

SEQ ID NO: 1577 - DNA, 85 bp, Mycobacterium tuberculosis
  marker
cgaacgagtgcatggatatgcacgggctcaagttgggaaagcgtggccacgatgagtgatgccggctcgaccttctggtcatcct

SEQ ID NO: 1578 - DNA, 85 bp, Mycobacterium tuberculosis
  marker
ctttgacgaacacgcgccacaaacgtactatctctttggcaaagtccaccggcatctcattcaacggttttgtttgcgcgtggtc

SEQ ID NO: 1579 - DNA, 82 bp, Mycobacterium tuberculosis
  marker
gaggacgcgatcagacaacggaatggcctagccgccgtcgcggtggctttgcgcgactggggcggctcacggaatggtcgtc

SEQ ID NO: 1580 - DNA, 81 bp, Mycobacterium tuberculosis
  marker
tcggcaacttccggccagaccagcttggacctggacaccgcggccatcgatgaggcgctgggccgctccggcaccatcgcg

SEQ ID NO: 1581 - DNA, 80 bp, Mycobacterium tuberculosis
  marker
tcgacggattcagcgtatcgcgatcacggaagcggccacgccgatttgggaagctcgtcccggcttacacttcggcgggc

SEQ ID NO: 1582 - DNA, 76 bp, Mycobacterium tuberculosis
  marker
gccgctgctgaatgccaaattgctcgtgctcggtcatctggctttgaacgtctacgaccccgataacggttacggc

SEQ ID NO: 1583 - DNA, 69 bp, Mycobacterium tuberculosis
  marker
cgaggcccaagtcatcgctctgcagcgaagcgagggtaagggcctgctcagccgcctgagctgaacgac

SEQ ID NO: 1584 - DNA, 67 bp, Mycobacterium tuberculosis
  marker
cgcggtagcgggcgctgactcgacaggaggtccgccaagcaacgtcgtcgccggtggtgcttgcgcc

SEQ ID NO: 1585 - DNA, 65 bp, Mycobacterium tuberculosis
  marker
cgatgcaccgcggcgatcccaccgaagccggtggcatcgatgttggcgccgacctcgtagcgcac

SEQ ID NO: 1586 - DNA, 65 bp, Mycobacterium tuberculosis
  marker
ccggctcatgcgatcggatgacgtaataacataccatccggcgagccggtcgataaagtagcgga

SEQ ID NO: 1587 - DNA, 64 bp, Mycobacterium tuberculosis
  marker
ccctacgacacggatgccctgacgcgcgacgcggcggcacgcgccgaactcgtcggcaggactc

SEQ ID NO: 1588 - DNA, 64 bp, Mycobacterium tuberculosis
  marker
aaaggatagtccggccgtcattcgtttccgacccttggatcatgttcatgccagataagcggat

SEQ ID NO: 1589 - DNA, 62 bp, Mycobacterium tuberculosis
  marker
tcacagcgaggtagacagatcaggagaaagcgatgaatcgcatcgtgcagttcggagtttcc

SEQ ID NO: 1590 - DNA, 60 bp, Mycobacterium tuberculosis
  marker
tttagtatgcggattgtcgcgacaatggcatcgcacgagaaacgtcaacctaacccttat

SEQ ID NO: 1591 - RNA, 21 nt, Artificial Sequence
  crRNA backbone
uaauuucuacuaaguguagau
